(19) United States
(12) Patent Application Publication
(10) Pub. No.: US 2024/0150737 A1
(43) Pub. Date: May 9, 2024

(54) SOLUBLE ALKALINE PHOSPHATASE CONSTRUCTS AND EXPRESSION VECTORS INCLUDING A POLYNUCLEOTIDE ENCODING FOR SOLUBLE ALKALINE PHOSPHATASE CONSTRUCTS

(71) Applicants: RAMPART BIOSCIENCE, INC., Tucson, AZ (US); THE REGENTS OF THE UNIVERSITY OF CALIFORNIA, Oakland, CA (US)

(72) Inventors: JEFFREY S. BARTLETT, Columbus, OH (US); ANJIE ZHEN, Los Angeles, CA (US); MING YAN, Encino, CA (US); LOUIS RANDALL BRETON, Tucson, AZ (US); Irvin S.Y. CHEN, Palos Verdes Estates, CA (US)

(21) Appl. No.: 18/114,528

(22) Filed: Feb. 27, 2023

Related U.S. Application Data
(63) Continuation of application No. PCT/US21/48943, filed on Sep. 2, 2021.
(60) Provisional application No. 63/074,418, filed on Sep. 3, 2020.

(51) Int. Cl. C12N 9/16; C12N 15/86

(52) U.S. Cl. CPC C12N 9/16; C12N 15/86; C07K 2319/30; C12N 2740/15043; C12Y 301/03001

(57) ABSTRACT

The present disclosure is directed to polypeptides, such as polypeptides comprising an alkaline phosphatase and a bone-targeting moiety. Also disclosed are expression vectors, such as lentiviral expression vectors, including a nucleotide sequence encoding a polypeptide. Also disclosed are methods of treating hypophosphatasia or treating, mitigating, or preventing one or more symptoms of hypophosphatasia by administering to a subject in need of treatment thereof the disclosed polypeptides or host cells transduced to express any of the disclosed polypeptides.

### CROSS-REFERENCE TO RELATED APPLICATIONS

[0001] The present application is a continuation of International Application No. PCT/US2021/048943 filed on Sep. 2, 2021, which application claims the benefit of the filing date of U.S. Provisional Patent Application No. 63/074,418 filed on Sep. 3, 2020, the disclosure of which is hereby incorporated by reference herein in its entirety.

### FIELD OF THE DISCLOSURE

[0002] The present disclosure relates to polypeptides and, in particular, polypeptides which target bone tissue. Also disclosed are expression vectors, such as lentiviral expression vectors, including one or more nucleotide sequences encoding a polypeptide. In some embodiments, the polypeptides are useful for treating hypophosphatasia or for treating, mitigating, or preventing one or more symptoms of hypophosphatasia in a subject in need of treatment thereof.

### SEQUENCE LISTING

[0003] The contents of the electronic sequence listing (RPT-003WO.xml; Size: 637,881 bytes; and Date of Creation: Feb. 20, 2023) is herein incorporated by reference in its entirety.

### BACKGROUND OF THE DISCLOSURE

[0004] Abnormalities in the levels of calcification and ossification lead to a spectrum of diseases, such as general arterial calcification of infancy (GACI), idiopathic infantile arterial calcification (IIAC), pseudoxanthoma elasticum (PXE), ossification of posterior longitudinal ligament (OPLL), medial wall vascular calcification (MWVC), autosomal recessive hypophosphatemia rickets type-2 (ARHR2), end state renal disease (ESRD), chronic kidney disease-bone/mineral disorder (CKD-MBD), X-linked hypophosphatemia (XLH), age related osteopenia, calcific uremic arteriolopathy (CUA) and hypophosphatemic rickets.

[0005] Hypophosphatasia (HPP) is a rare, heritable skeletal disease with an incidence of 1 per 100,000 births for the most severe forms of the disease. The disorder results from loss-of-function mutations in the gene encoding tissue-nonspecific alkaline phosphatase (TNSALP). HPP patients present a remarkable range of symptoms, from teeth loss or osteomalacia (rickets) to almost complete absence of bone mineralization in utero. Many patients with HPP present the characteristics of skeletal deformities, short stature, muscle and bone pain, impaired mobility, and premature loss of teeth. Perinatal-onset or infantile-onset HPP can also be characterized by the presence of rachitic chest deformity, vitamin B6-dependent seizures, and failure to thrive. In particular, HPP presenting at less than six months of age is often lethal due to respiratory insufficiency, with a low survival rate at one year of age.

### BRIEF SUMMARY OF THE DISCLOSURE

[0006] A first aspect of the present disclosure is a polypeptide comprising Formula (I):

[A]ᵥ-[B]-[C]_{w}-[R]_{q}-([D]ₓ-[E]_{y})_{z}, (I)
[0007] wherein
[0008] A comprises an amino acid sequence encoding a secretion signal peptide;
[0009] B comprises an amino acid encoding an alkaline phosphatase;
[0010] C comprises an amino acid sequence encoding a GPI anchor;
[0011] R is -(Mₒ(Fc)Nₚ)-, where M and N each independently include between 1 and 6 amino acids, where Fc is a Fc domain, and o and p are each independently 0, 1, or 2;
[0012] D comprises an amino acid sequence having between 4 and 6 amino acids, or is F(G)ₜF, where each F is the same amino acid, G is an amino acid sequence having 3, 4, or 5 amino acids, and t is an integer ranging from 2-5;
[0013] E comprises an amino acid sequence having between 1 and 8 amino acids;
[0014] q is 0 or 1;
[0015] v is 0 or 1;
[0016] w is 0 or 1;
[0017] x is 0 or an integer ranging from 1 to 6;
[0018] y is 0 or an integer ranging from 1 to 16; and
[0019] z is 0 or an integer ranging from 1 to 6.

[0020] In some embodiments, the polypeptide is catalytically competent to allow formation of hydroxyapatite crystals, such as in bone. In some embodiments, the polypeptide is capable of catalyzing the cleavage of inorganic pyrophosphate.

[0021] In some embodiments, q is zero. In some embodiments, q is zero and x is one or more.

[0022] In some embodiments, B comprises an amino acid sequence having at least 95% identity to SEQ ID NO: 11. In some embodiments, B comprises an amino acid sequence having at least 99% identity to SEQ ID NO: 11. In some embodiments, B comprises the amino acid sequence of SEQ ID NO: 11.

[0023] In some embodiments, the group [A]ᵥ-[B]-[C]_{w} comprises an amino acid sequence having at least 90% sequence identity to SEQ ID NO: 10. In some embodiments, the group [A], [B]-[C]_{w} comprises an amino acid sequence having at least 95% sequence identity to SEQ ID NO: 10. In some embodiments, the group [A]ᵥ-[B]-[C]_{w} comprises an amino acid sequence having at least 96% sequence identity to SEQ ID NO: 10. In some embodiments, [A]ᵥ-[B]-[C]_{w} comprises an amino acid sequence having at least 97% sequence identity to SEQ ID NO: 10. In some embodiments, the group [A]ᵥ-[B]-[C]_{w} comprises an amino acid sequence having at least 98% sequence identity to SEQ ID NO: 10. In some embodiments, the group [A]ᵥ-[B]-[C]_{w} comprises an amino acid sequence having at least 99% sequence identity to SEQ ID NO: 10. In some embodiments, the group [A]ᵥ-[B]-[C]_{w} comprises an amino acid sequence having SEQ ID NO: 10.

[0024] In some embodiments, A comprises an amino acid sequence having at least 95% identity to any one of SEQ ID NOS: 12 and 33-43. In some embodiments, A comprises an amino acid sequence having any one of SEQ ID NOS: 12 and 33-43. In some embodiments, v is 1 and w is 0. In some embodiments, z is 0. In some embodiments, x is 0. In some embodiments, the polypeptide has at least 95% sequence identity to any one of SEQ ID NO: 2. In some embodiments, the polypeptide comprises SEQ ID NO: 2.

[0025] In some embodiments, E comprises at most two amino acids. In some embodiments, E comprises 1 amino acid. In some embodiments, E comprises aspartic acid. In some embodiments, E comprises aspartic acid and y ranges from between 8 and 12. In some embodiments, E comprises aspartic acid, y ranges from between 8 and 12, and v is 1 and w is 0. In some embodiments, E comprises aspartic acid, y ranges from between 8 and 12, and v is 0. In some embodiments, E comprises aspartic acid, y ranges from between 8 and 12, and y is 10. In some embodiments, the polypeptide has at least 95% sequence identity to SEQ ID NO: 3. In some embodiments, the polypeptide comprises SEQ ID NO: 3.

[0026] In some embodiments, D comprises at most 5 amino acids (e.g., D may be -G-G-G-G-S-, as described herein). In some embodiments, at least three contiguous amino acids of the at most 5 amino acids are the same. In some embodiments, the at least three contiguous amino acids are each glycine. In some embodiments, the at least three contiguous amino acids are each glycine, and x is an integer ranging from 1 to 3. In some embodiments, the at least three contiguous amino acids are each glycine, and x is 2. In some embodiments, the at least three contiguous amino acids are each glycine, and y is an integer ranging from between 4 and 8. In some embodiments, the at least three contiguous amino acids are each glycine, and y is between 5 and 7. In some embodiments, y is 6.

[0027] In some embodiments, E comprises 3 amino acids. In some embodiments, at least 2 contiguous amino acids of the three amino acids are the same. In some embodiments, two contiguous amino acids of the 3 amino acids are each serine. In some embodiments, E comprises -asp-ser-ser-. In some embodiments, the polypeptide of Formula (I) has at least 95% sequence identity to SEQ ID NO: 6. In some embodiments, the polypeptide of Formula (I) comprises SEQ ID NO: 6.

[0028] In some embodiments, E comprises 1 or 2 amino acids. In some embodiments, E comprises 1 amino acid. In some embodiments, E comprises a single aspartic acid. In some embodiments, E is aspartic acid and y is between 8 and 12. In some embodiments, E is aspartic acid and y is 10. In some embodiments, the polypeptide of Formula (I) has at least 95% sequence identity to SEQ ID NO: 4. In some embodiments, the polypeptide of Formula (I) has at least 97% sequence identity to SEQ ID NO: 4. In some embodiments, the polypeptide of Formula (I) has at least 99% sequence identity to SEQ ID NO: 4. In some embodiments, the polypeptide of Formula (I) comprises SEQ ID NO: 4.

[0029] In some embodiments, E comprises between 2 and 8 amino acids. In some embodiments, E comprises between 2 and 6 amino acids. In some embodiments, E comprises between 2 and 4 amino acids. In some embodiments, E comprises 3 amino acids. In some embodiments, at least 2 contiguous amino acids of the 3 amino acids of the group E are the same. In some embodiments, y ranges from 4 to 8. In some embodiments, y ranges from 5 to 7. In some embodiments, y is 6. In some embodiments, E comprises -asp-ser-ser-. In some embodiments, v is 1 and w is 0.

[0030] In some embodiments, the polypeptide of Formula (I) has at least 80% sequence identity to SEQ ID NO: 5. In some embodiments, the polypeptide of Formula (I) has at least 85% sequence identity to SEQ ID NO: 5. In some embodiments, the polypeptide of Formula (I) has at least 90% sequence identity to SEQ ID NO: 5. In some embodiments, the polypeptide of Formula (I) has at least 95% sequence identity to SEQ ID NO: 5. In some embodiments, the polypeptide of Formula (I) has at least 96% sequence identity to SEQ ID NO: 5. In some embodiments, the polypeptide of Formula (I) has at least 97% sequence identity to SEQ ID NO: 5. In some embodiments, the polypeptide of Formula (I) has at least 98% sequence identity to SEQ ID NO: 5. In some embodiments, the polypeptide of Formula (I) has at least 99% sequence identity to SEQ ID NO: 5. In some embodiments, polypeptide of Formula (I) comprises SEQ ID NO: 5.

[0031] In some embodiments, the polypeptide of Formula (I) has at least 80% sequence identity to any one of SEQ ID NOS: 44-54, 68, 105, and 116-125. In some embodiments, the polypeptide of Formula (I) has at least 85% sequence identity to any one of SEQ ID NOS: 44-54, 105, and 116-125. In some embodiments, the polypeptide of Formula (I) has at least 90% sequence identity to any one of SEQ ID NOS: 44-54, 68, 105, and 116-125. In some embodiments, the polypeptide of Formula (I) has at least 95% sequence identity to any one of SEQ ID NOS: 44-54, 68, 105, and 116-125. In some embodiments, the polypeptide of Formula (I) has at least 96% sequence identity to any one of SEQ ID NOS: 44-54, 68, 105, and 116-125. In some embodiments, the polypeptide of Formula (I) has at least 97% sequence identity to any one of SEQ ID NOS: SEQ ID NOS: 44-54, 68, 105, and 116-125. In some embodiments, the polypeptide of Formula (I) has at least 98% sequence identity to any one of SEQ ID NOS: 44-54, 105, and 116-125. In some embodiments, the polypeptide of Formula (I) has at least 99% sequence identity to any one of SEQ ID NOS: SEQ ID NOS: 44-54, 68, 105, and 116-125. In some embodiments, polypeptide of Formula (I) comprises any one of SEQ ID SEQ ID NOS: 44-54, 68, 105, and 116-125.

[0032] In some embodiments, the amino acid sequence encoding the GPI anchor has at least 95% sequence identity to SEQ ID NO: 13. In some embodiments, the amino acid sequence encoding the GPI anchor has SEQ ID NO: 14. In some embodiments, the polypeptide of Formula (I) has at least 95% sequence identity to SEQ ID NO: 8. In some embodiments, the polypeptide of Formula (I) has at least 97% sequence identity to SEQ ID NO: 8. In some embodiments, the polypeptide of Formula (I) has at least 99% sequence identity to SEQ ID NO: 8. In some embodiments, the polypeptide comprises SEQ ID NO: 8.

[0033] In some embodiments, v is 1, w is 1, and the amino acid sequence encoding the GPI anchor has at least 95% sequence identity to SEQ ID NO: 13. In some embodiments, v is 1, w is 1, and the amino acid sequence encoding the GPI anchor has at least 97% sequence identity to SEQ ID NO: 13. In some embodiments, v is 1, w is 1, and the amino acid sequence encoding the GPI anchor has at least 99% sequence identity to SEQ ID NO: 13. In some embodiments, v is 1, w is 1, and the amino acid sequence encoding the GPI anchor has SEQ ID NO: 14. In some embodiments, v is 1, w is 1 and the polypeptide of Formula (I) has at least 95% sequence identity to SEQ ID NO: 7. In some embodiments, v is 1, w is 1 and polypeptide of Formula (I) comprises SEQ ID NO: 7.

[0034] A second aspect of the present disclosure is a lentiviral vector including a nucleic acid sequence encoding a polypeptide having Formula (I):

[A]ᵥ-[B]-[C]_{w}-[R]_{q}-([D]ₓ-[E]_{y})_{z}, (I)
[0035] wherein
[0036] A comprises an amino acid sequence encoding a secretion signal peptide;
[0037] B comprises an amino acid encoding an alkaline phosphatase;
[0038] C comprises an amino acid sequence encoding a GPI anchor;
[0039] R is -(Mₒ(Fc)Nₚ)-, where M and N each independently include between 1 and 6 amino acids, where Fc is a Fc domain, and o and p are each independently 0, 1, or 2;
[0040] D comprises an amino acid sequence having between 4 and 6 amino acids, or is F(G)ₜF, where each F is the same amino acid, G is an amino acid sequence having 3, 4, or 5 amino acids, and t is an integer ranging from 2-5;
[0041] E comprises an amino acid sequence having between 1 and 8 amino acids;
[0042] q is 0 or 1;
[0043] v is 0 or 1;
[0044] w is 0 or 1;
[0045] x is 0 or an integer ranging from 1 to 6;
[0046] y is 0 or an integer ranging from 1 to 16; and
[0047] z is 0 or an integer ranging from 1 to 6.

[0048] Specific examples of polypeptides having Formula (I) are recited herein and described above with regard to the first aspect of the present disclosure. In some embodiments, the polypeptide does not comprise the amino acid sequence of SEQ ID NO: 1 or does not comprise the amino acid sequence encoded by the nucleotide sequence of SEQ ID NO: 107.

[0049] In some embodiments, the nucleic acid sequence encoding the polypeptide is operably linked to a promoter. In some embodiments, the promoter is selected from the group consisting of EF1A, MND, CD11b, CD68LPP, EF1a1, EFS, and UbC. In some embodiments, the lentiviral vector further comprises a UCOE promoter element. In some embodiments, the promoter has at least 95% identity to any one of SEQ ID NOS: 66, 67, 96, 99, 100, 101, and 126. In some embodiments, the promoter has at least 96% identity to any one of SEQ ID NOS: 66, 67, 96, 99, 100, 101, and 126. In some embodiments, the promoter has at least 97% identity to any one of SEQ ID NOS: 66, 67, 96, 99, 100, 101, and 126. In some embodiments, the promoter has at least 95% identity to any one of SEQ ID NOS: 66, 67, 96, 99, 100, 101, and 126. In some embodiments, the promoter has at least 98% identity to any one of SEQ ID NOS: 66, 67, 96, 99, 100, 101, and 126. In some embodiments, the promoter has at least 99% identity to any one of SEQ ID NOS: 66, 67, 96, 99, 100, 101, and 126. In some embodiments, the promoter comprises any one of SEQ ID NOS: 66, 67, 96, 99, 100, 101, and 126. In some embodiments, the lentiviral vector further comprises an insulator. In some embodiments, the lentiviral vector further comprises one or more Matrix Attachment Regions. In some embodiments, the lentiviral vector further comprises a WPRE element. In some embodiments, the lentiviral vector does not include a WPRE element.

[0050] In some embodiments, the lentiviral vector comprises a nucleotide sequence having at least 80% sequence identity to any one of SEQ ID NOS: 16-26, 55-65, 74, 81, 82, 84-95, 97, and 98. In some embodiments, the lentiviral vector comprises a nucleotide sequence having at least 85% sequence identity to any one of SEQ ID NOS: 16-26, 55-65, 74, 81, 82, 84-95, 97, and 98. In some embodiments, the lentiviral vector comprises a nucleotide sequence having at least 90% sequence identity to any one of SEQ ID NOS: 16-26, 55-65, 74, 81, 82, 84-95, 97, and 98. In some embodiments, the lentiviral vector comprises a nucleotide sequence having at least 95% sequence identity to any one of SEQ ID NOS: 16-26, 55-65, 74, 81, 82, 84-95, 97, and 98. In some embodiments, the lentiviral vector comprises a nucleotide sequence having at least 96% sequence identity to any one of SEQ ID NOS: 16-26, 55-65, 74, 81, 82, 84-95, 97, and 98. In some embodiments, the lentiviral vector comprises a nucleotide sequence having at least 97% sequence identity to any one of SEQ ID NOS: 16-26, 55-65, 74, 81, 82, 84-95, 97, and 98. In some embodiments, the lentiviral vector comprises a nucleotide sequence having at least 98% sequence identity to any one of SEQ ID NOS: 16-26, 55-65, 74, 81, 82, 84-95, 97, and 98. In some embodiments, the lentiviral vector comprises a nucleotide sequence having at least 99% sequence identity to any one of SEQ ID NOS: 16-26, 55-65, 74, 81, 82, 84-95, 97, and 98. In some embodiments, the lentiviral viral vector comprises a nucleotide sequence having any one of SEQ ID NOS: 16-26, 55-65, 74, 81, 82, 84-95, 97, and 98.

[0051] A third aspect of the present disclosure is a population of host cells transduced with an expression vector, wherein the expression vector includes a nucleic acid sequence encoding a polypeptide having Formula (I):

[A]ᵥ-[B]-[C]_{w}-[R]_{q}-([D]ₓ-[E]_{y})_{z}, (I)
[0052] wherein
[0053] A comprises an amino acid sequence encoding a secretion signal peptide;
[0054] B comprises an amino acid encoding an alkaline phosphatase;
[0055] C comprises an amino acid sequence encoding a GPI anchor;
[0056] R is -(Mₒ(Fc)Nₚ)-, where M and N each independently include between 1 and 6 amino acids, where Fc is a Fc domain, and o and p are each independently 0, 1, or 2;
[0057] D comprises an amino acid sequence having between 4 and 6 amino acids, or is F(G)ₜF, where each F is the same amino acid, G is an amino acid sequence having 3, 4, or 5 amino acids, and t is an integer ranging from 2-5;
[0058] E comprises an amino acid sequence having between 1 and 8 amino acids;
[0059] q is 0 or 1;
[0060] v is 0 or 1;
[0061] w is 0 or 1;
[0062] x is 0 or an integer ranging from 1 to 6;
[0063] y is 0 or an integer ranging from 1 to 16; and
[0064] z is 0 or an integer ranging from 1 to 6.

[0065] Specific examples of polypeptides having Formula (I) are recited herein and described above with regard to the first aspect of the present disclosure. In some embodiments, the polypeptide does not comprise the amino acid sequence of SEQ ID NO: 1 or does not comprise the amino acid sequence encoded by the nucleotide sequence of SEQ ID NO: 107.

[0066] In some embodiments, the expression vector is a retroviral vector. In some embodiments, the expression vector is a lentiviral vector. In some embodiments, the lentiviral vector comprises a nucleotide sequence having at least 80% sequence identity to any one of SEQ ID NOS: 15-26, 55-65, 74, 81, 82, 84-95, 97, and 98. In some embodiments, the lentiviral vector comprises a nucleotide sequence having at least 85% sequence identity to any one of SEQ ID NOS: 15-26, 55-65, 74, 81, 82, 84-95, 97, and 98. In some embodiments, the lentiviral vector comprises a nucleotide sequence having at least 90% sequence identity to any one of SEQ ID NOS: 15-26, 55-65, 74, 81, 82, 84-95, 97, and 98. In some embodiments, the lentiviral vector comprises a nucleotide sequence having at least 95% sequence identity to any one of SEQ ID NOS: 15-26, 55-65, 74, 81, 82, 84-95, 97, and 98. In some embodiments, the lentiviral vector comprises a nucleotide sequence having at least 96% sequence identity to any one of SEQ ID NOS: 15-26, 55-65, 74, 81, 82, 84-95, 97, and 98. In some embodiments, the lentiviral vector comprises a nucleotide sequence having at least 97% sequence identity to any one of SEQ ID NOS: 15-26, 55-65, 74, 81, 82, 84-95, 97, and 98. In some embodiments, the lentiviral vector comprises a nucleotide sequence having at least 98% sequence identity to any one of SEQ ID NOS: 15-26, 55-65, 74, 81, 82, 84-95, 97, and 98. In some embodiments, the lentiviral vector comprises a nucleotide sequence having at least 99% sequence identity to any one of SEQ ID NOS: 15-26, 55-65, 74, 81, 82, 84-95, 97, and 98. In some embodiments, the lentiviral viral vector comprises a nucleotide sequence having any one of SEQ ID NOS: 15-26, 55-65, 74, 81, 82, 84-95, 97, and 98.

[0067] In some embodiments, the host cells are hematopoietic stem cells. In some embodiments, the host cells are mesenchymal cells. In some embodiments, the host cells are bone marrow cells. In some embodiments, the host cells are hepatocytes. In some embodiments, the host cells are endothelial cells. In some embodiments, the host cells are transduced ex vivo. In some embodiments, the host cells are transduced in vivo.

[0068] In some embodiments, the transduced host cells express a polypeptide having Formula (I). In some embodiments, the transduced host cells may be administered to a mammalian subject in need of treatment thereof.

[0069] A fourth aspect of the present disclosure is a method of transducing a population of host cells comprising: obtaining a population of host cells and contacting the obtained population of host cells with an expression vector including a nucleic acid sequence encoding a polypeptide having Formula (I):

[A]ᵥ-[B]-[C]_{w}-[R]_{q}-([D]ₓ-[E]_{y})_{z}, (I)
[0070] wherein
[0071] A comprises an amino acid sequence encoding a secretion signal peptide;
[0072] B comprises an amino acid encoding an alkaline phosphatase;
[0073] C comprises an amino acid sequence encoding a GPI anchor;
[0074] R is -(Mₒ(Fc)Nₚ)-, where M and N each independently include between 1 and 6 amino acids, where Fc is a Fc domain, and o and p are each independently 0, 1, or 2;
[0075] D comprises an amino acid sequence having between 4 and 6 amino acids, or is F(G)ₜF, where each F is the same amino acid, G is an amino acid sequence having 3, 4, or 5 amino acids, and t is an integer ranging from 2-5;
[0076] E comprises an amino acid sequence having between 1 and 8 amino acids;
[0077] q is 0 or 1;
[0078] v is 0 or 1;
[0079] w is 0 or 1;
[0080] x is 0 or an integer ranging from 1 to 6;
[0081] y is 0 or an integer ranging from 1 to 16; and
[0082] z is 0 or an integer ranging from 1 to 6.

[0083] In some embodiments, the transduction occurs ex vivo.

[0084] In some embodiments, the transduction occurs in vivo.

[0085] Specific examples of polypeptides having Formula (I) are recited herein and described above with regard to the first aspect of the present disclosure. In some embodiments, the polypeptide does not comprise the amino acid sequence of SEQ ID NO: 1 or does not comprise the amino acid sequence encoded by the nucleotide sequence of SEQ ID NO: 107.

[0086] In some embodiments, the expression vector is a retroviral vector. In some embodiments, the expression vector is a lentiviral vector. In some embodiments, the lentiviral vector comprises a nucleotide sequence having at least 80% sequence identity to any one of SEQ ID NOS: 15-26, 55-65, 74, 81, 82, 84-95, 97, and 98. In some embodiments, the lentiviral vector comprises a nucleotide sequence having at least 85% sequence identity to any one of SEQ ID NOS: 15-26, 55-65, 74, 81, 82, 84-95, 97, and 98. In some embodiments, the lentiviral vector comprises a nucleotide sequence having at least 90% sequence identity to any one of SEQ ID NOS: 15-26, 55-65, 74, 81, 82, 84-95, 97, and 98. In some embodiments, the lentiviral vector comprises a nucleotide sequence having at least 95% sequence identity to any one of SEQ ID NOS: 15-26, 55-65, 74, 81, 82, 84-95, 97, and 98. In some embodiments, the lentiviral vector comprises a nucleotide sequence having at least 96% sequence identity to any one of SEQ ID NOS: 15-26, 55-65, 74, 81, 82, 84-95, 97, and 98. In some embodiments, the lentiviral vector comprises a nucleotide sequence having at least 97% sequence identity to any one of SEQ ID NOS: 15-26, 55-65, 74, 81, 82, 84-95, 97, and 98. In some embodiments, the lentiviral vector comprises a nucleotide sequence having at least 98% sequence identity to any one of SEQ ID NOS: 15-26, 55-65, 74, 81, 82, 84-95, 97, and 98. In some embodiments, the lentiviral vector comprises a nucleotide sequence having at least 99% sequence identity to any one of SEQ ID NOS: 15-26, 55-65, 74, 81, 82, 84-95, 97, and 98. In some embodiments, the lentiviral viral vector comprises a nucleotide sequence having any one of SEQ ID NOS: 15-26, 55-65, 74, 81, 82, 84-95, 97, and 98.

[0087] An fifth aspect of the present disclosure is a pharmaceutical composition comprising a population of modified host cells, wherein the population of modified host cells express a polypeptide having Formula (I):

[A]ᵥ-[B]-[C]_{w}-[R]_{q}-([D]ₓ-[E]_{y})_{z}, (I)
[0088] wherein
[0089] A comprises an amino acid sequence encoding a secretion signal peptide;
[0090] B comprises an amino acid encoding an alkaline phosphatase;
[0091] C comprises an amino acid sequence encoding a GPI anchor;
[0092] R is -(Mₒ(Fc)Nₚ)-, where M and N each independently include between 1 and 6 amino acids, where Fc is a Fc domain, and o and p are each independently 0, 1, or 2;
[0093] D comprises an amino acid sequence having between 4 and 6 amino acids, or is F(G)ₜF, where each F is the same amino acid, G is an amino acid sequence having 3, 4, or 5 amino acids, and t is an integer ranging from 2-5;
[0094] E comprises an amino acid sequence having between 1 and 8 amino acids;
[0095] q is 0 or 1;
[0096] v is 0 or 1;
[0097] w is 0 or 1;
[0098] x is 0 or an integer ranging from 1 to 6;
[0099] y is 0 or an integer ranging from 1 to 16; and
[0100] z is 0 or an integer ranging from 1 to 6.

[0101] Specific examples of polypeptides having Formula (I) are recited herein and described above with regard to the first aspect of the present disclosure. In some embodiments, the polypeptide does not comprise the amino acid sequence of SEQ ID NO: 1 or does not comprise the amino acid sequence encoded by the nucleotide sequence of SEQ ID NO: 107. In some embodiments, the host cells are transduced ex vivo. In some embodiments, the host cells are transduced in vivo.

[0102] A sixth aspect of the present disclosure is a method of treating a mammalian subject comprising administering a pharmaceutically effective amount of a population of modified host cells to the mammalian subject, wherein the population of modified host cells express a polypeptide having Formula (I):

[A]ᵥ-[B]-[C]_{w}-[R]_{q}-([D]ₓ-[E]_{y})_{z}, (I)
[0103] wherein
[0104] A comprises an amino acid sequence encoding a secretion signal peptide;
[0105] B comprises an amino acid encoding an alkaline phosphatase;
[0106] C comprises an amino acid sequence encoding a GPI anchor;
[0107] R is -(Mₒ(Fc)Nₚ)-, where M and N each independently include between 1 and 6 amino acids, where Fc is a Fc domain, and o and p are each independently 0, 1, or 2;
[0108] D comprises an amino acid sequence having between 4 and 6 amino acids, or is F(G)ₜF, where each F is the same amino acid, G is an amino acid sequence having 3, 4, or 5 amino acids, and t is an integer ranging from 2-5;
[0109] E comprises an amino acid sequence having between 1 and 8 amino acids;
[0110] q is 0 or 1;
[0111] v is 0 or 1;
[0112] w is 0 or 1;
[0113] x is 0 or an integer ranging from 1 to 6;
[0114] y is 0 or an integer ranging from 1 to 16; and
[0115] z is 0 or an integer ranging from 1 to 6.

[0116] Specific examples of polypeptides having Formula (I) are recited herein and described above with regard to the first aspect of the present disclosure. In some embodiments, the polypeptide does not comprise the amino acid sequence of SEQ ID NO: 1 or does not comprise the amino acid sequence encoded by the nucleotide sequence of SEQ ID NO: 107.

[0117] In some embodiments, the mammalian subject was previously treated with, will be treated with, or is concurrently being treated with a polypeptide having an amino acid sequence having SEQ ID NO: 1.

[0118] In some embodiments, q is 0. In some embodiments, q is 0 and wherein E comprises between 2 and 4 amino acids. In some embodiments, q is 0 and wherein E comprises three amino acids. In some embodiments, q is 0 and wherein E comprises -D-S-S-. In some embodiments, q is 0, E comprises -D-S-S-, and x is 0.

[0119] In some embodiments, q is 1. In some embodiments, q is 1 and wherein E comprises between 2 and 4 amino acids. In some embodiments, q is 1 and wherein E comprises three amino acids. In some embodiments, q is 1 and wherein E comprises -D-S-S-. In some embodiments, q is 1, E comprises -D-S-S-, and x is 0.

[0120] In some embodiments, q is 0. In some embodiments, q is 0 and [D]ₓ is [-G-G-G-G-S-]₂. In some embodiments, q is 0, [D]ₓ is [-G-G-G-G-S-]₂, and [E]y is [D]₁₀. In some embodiments, q is 0, [D]ₓ is [-G-G-G-G-S-]₂, and [E]y is [D]₆.

[0121] In some embodiments, q is 1. In some embodiments, q is 1 and [D]ₓ is [-G-G-G-G-S-]₂. In some embodiments, q is 1, [D]ₓ is [-G-G-G-G-S-]₂, and [E]y is [D]₁₀. In some embodiments, q is 1, [D]ₓ is [-G-G-G-G-S-]₂, and [E]y is [D]₆.

[0122] A seventh aspect of the present disclosure is a polypeptide comprising Formula (IA):

[A]ᵥ-[B]-[C]_{w}-[R]_{q}-([D]ₓ-[E]_{y})_{z}, (IA)
[0123] wherein
[0124] A comprises an amino acid sequence encoding a secretion signal peptide;
[0125] B comprises an amino acid encoding an alkaline phosphatase;
[0126] C comprises an amino acid sequence encoding a GPI anchor;
[0127] R is -(Mₒ(Fc)Nₚ)-, where M and N each independently include between 1 and 6 amino acids, where Fc is a Fc domain, and o and p are each independently 0, 1, or 2;
[0128] D comprises an amino acid sequence having between 4 and 6 amino acids, or is F(G)ₜF, where each F is the same amino acid, G is an amino acid sequence having 3, 4, or 5 amino acids, and t is an integer ranging from 2-5;
[0129] E comprises an amino acid sequence having between 1 and 8 amino acids;
[0130] q is 0 or 1;
[0131] v is 0 or 1;
[0132] w is 0 or 1;
[0133] x is 0 or an integer ranging from 1 to 6;
[0134] y is 0 or an integer ranging from 1 to 16; and
[0135] z is 0 or an integer ranging from 1 to 6;
[0136] provided that the polypeptide of Formula (IA) does not have the amino acid sequence of SEQ ID NO: 1 or does not comprise the amino acid sequence encoded by the nucleotide sequence of SEQ ID NO: 107.

[0137] In some embodiments, the polypeptide is catalytically competent to allow formation of hydroxyapatite crystals, such as in bone. In some embodiments, the polypeptide is capable of catalyzing the cleavage of inorganic pyrophosphate.

[0138] In some embodiments, B comprises at least 99% sequence identity to SEQ ID NO: 11. In some embodiments, B comprises SEQ ID NO: 11.

[0139] In some embodiments, [A]ᵥ-[B]-[C]_{w} comprises an amino acid sequence having at least 97% sequence identity to SEQ ID NO: 10. In some embodiments, [A]ᵥ-[B]-[C]_{w} comprises SEQ ID NO: 10.

[0140] In some embodiments, A comprises an amino acid sequence having at least 99% identity to any one of SEQ ID NOS: 12 and 33-43. In some embodiments, A comprises an amino acid sequence having any one of SEQ ID NOS: 12 and 33-43.

[0141] In some embodiments, R comprises at least 99% identity to that of SEQ ID NO: 9. In some embodiments, R comprises SEQ ID NO: 9.

[0142] In some embodiments, o, p, and q are each 1. In some embodiments, M comprises 2 amino acids; and N comprises two amino acids; and M and N are different. In some embodiments, M is -L-K-. In some embodiments, N is -D-I-. In some embodiments, E comprises between 2 and 4 amino acids. In some embodiments, E comprises 3 amino acids. In some embodiments, at least 2 contiguous amino acids of the 3 amino acids are the same. In some embodiments, E comprises -D-S-S-.

[0143] In some embodiments, q is 0.

[0144] In some embodiments, q is 1. In some embodiments, x is 0. In some embodiments, z is 1. In some embodiments, y ranges from 4-8. In some embodiments, y is 6.

[0145] In some embodiments, [E]y is [-D-S-S-]₆.

[0146] In some embodiments, [E]y is [-D-S-S-]₆ and q is 0. In some embodiments, [E]_{y} is [-D-S-S-]₆, q is 0 and x is 0.

[0147] In some embodiments, [E]_{y} is [-D-S-S-]₆ and q is 1. In some embodiments, [E]_{y} is [-D-S-S-]₆, q is 1, and x is 0. In some embodiments, [E]_{y} is [-D-S-S-]₆, q is 1, and Fc comprises at least 97% identity to SEQ ID NO: 130. In some embodiments, [E]_{y} is [-D-S-S-]₆, q is 1, and Fc comprises at least 99% identity to SEQ ID NO: 130. In some embodiments, [E]_{y} is [-D-S-S-]₆, q is 1, and Fc comprises SEQ ID NO: 130.

[0148] In some embodiments, q is 1 and R comprises at least 97% identity to SEQ ID NO: 9. In some embodiments, q is 1 and R comprises at least 99% identity to SEQ ID NO: 9. In some embodiments, q is 1 and R comprises SEQ ID NO: 9.

[0149] In some embodiments, [D]ₓ is [-G-G-G-G-S-]₂. In some embodiments, [E]_{y} is [D]₁₀. In some embodiments, [E]_{y} is [D]₆. In some embodiments, [R] is -[L-K]-Fc-[D-I]-, and Fc comprises at least 97% identity to SEQ ID NO: 130. In some embodiments, [R] is -[L-K]-Fc-[D-I]-, and Fc comprises at least 98% identity to SEQ ID NO: 130. In some embodiments, [R] is -[L-K]-Fc-[D-I]-, and Fc comprises at least 99% identity to SEQ ID NO: 130. In some embodiments, R comprises SEQ ID NO: 9.

[0150] In some embodiments, the polypeptide has an amino acid sequence having at least 90% identity to any one of 2-8, 44-54, 68, 75, 105, and 116-125. In some embodiments, the polypeptide has an amino acid sequence having at least 95% identity to any one of 2-8, 44-54, 68, 75, 105, and 116-125. In some embodiments, the polypeptide has an amino acid sequence having at least 96% identity to any one of 2-8, 44-54, 68, 75, 105, and 116-125. In some embodiments, the polypeptide has an amino acid sequence having at least 97% identity to any one of 2-8, 44-54, 68, 75, 105, and 116-125. In some embodiments, the polypeptide has an amino acid sequence having at least 98% identity to any one of 2-8, 44-54, 68, 75, 105, and 116-125. In some embodiments, the polypeptide has an amino acid sequence having at least 99% identity to any one of 2-8, 44-54, 68, 75, 105, and 116-125. In some embodiments, the polypeptide comprises an amino acid sequence having any one of 2-8, 44-54, 68, 75, 105, and 116-125.

[0151] In some embodiments, the polypeptide is encoded by a nucleotide sequence having at least 90% identity to any one of SEQ ID NOS: 106, 108-115, and 131. In some embodiments, the polypeptide is encoded by a nucleotide sequence having at least 95% identity to any one of SEQ ID NOS: 106, 108-115, and 131. In some embodiments, the polypeptide is encoded by a nucleotide sequence having at least 96% identity to any one of SEQ ID NOS: 106, 108-115, and 131. In some embodiments, the polypeptide is encoded by a nucleotide sequence having at least 97% identity to any one of SEQ ID NOS: 106, 108-115, and 131. In some embodiments, the polypeptide is encoded by a nucleotide sequence having at least 98% identity to any one of SEQ ID NOS: 106, 108-115, and 131. In some embodiments, the polypeptide is encoded by a nucleotide sequence having at least 99% identity to any one of SEQ ID NOS: 106, 108-115, and 131. In some embodiments, the polypeptide is encoded by a nucleotide sequence having any one of SEQ ID NOS: 106, 108-115, and 131.

[0152] An eighth aspect of the present disclosure is a lentiviral vector including a nucleotide sequence encoding a polypeptide having Formula (IA) (such as any of the polypeptides having Formula (IA) described herein). In some embodiments, the nucleotide sequence encoding the polypeptide having Formula (IA) is operably linked to a promoter. In some embodiments, the promoter is selected from EF1A, MND, CD11b, CD68LP, EF1a1, EFS, and UbC. In some embodiments, the promoter has at least 95% identity to any one of SEQ ID NOS: 66, 67, 96, 99, 100, 101, and 126. In some embodiments, the promoter has at least 96% identity to any one of SEQ ID NOS: 66, 67, 96, 99, 100, 101, and 126. In some embodiments, the promoter has at least 97% identity to any one of SEQ ID NOS: 66, 67, 96, 99, 100, 101, and 126. In some embodiments, the promoter has at least 95% identity to any one of SEQ ID NOS: 66, 67, 96, 99, 100, 101, and 126. In some embodiments, the promoter has at least 98% identity to any one of SEQ ID NOS: 66, 67, 96, 99, 100, 101, and 126. In some embodiments, the promoter has at least 99% identity to any one of SEQ ID NOS: 66, 67, 96, 99, 100, 101, and 126. In some embodiments, the promoter comprises any one of SEQ ID NOS: 66, 67, 96, 99, 100, 101, and 126.

[0153] In some embodiments, the lentiviral vector further comprises a UCOE promoter element. In some embodiments, the lentiviral vector further comprises an insulator. In some embodiments, the lentiviral vector further comprises one or more Scaffold/Matrix Attachment Regions. In some embodiments, the lentiviral vector further comprises a WPRE element. In some embodiments, the lentiviral vector does not include a nucleotide sequence encoding a WPRE element. In some embodiments, the lentiviral vector comprises a nucleotide sequence having at least 95% sequence identity to any one of SEQ ID NOS: 16-26, 55-65, 74, 81, 82, 84-95, 97, and 98. In some embodiments, the lentiviral vector comprises a nucleotide sequence having at least 96% sequence identity to any one of SEQ ID NOS: 16-26, 55-65, 74, 81, 82, 84-95, 97, and 98. In some embodiments, the lentiviral vector comprises a nucleotide sequence having at least 97% sequence identity to any one of SEQ ID NOS: 16-26, 55-65, 74, 81, 82, 84-95, 97, and 98. In some embodiments, the lentiviral vector comprises a nucleotide sequence having at least 98% sequence identity to any one of SEQ ID NOS: 16-26, 55-65, 74, 81, 82, 84-95, 97, and 98. In some embodiments, the lentiviral vector comprises a nucleotide sequence having at least 99% sequence identity to any one of SEQ ID NOS: 16-26, 55-65, 74, 81, 82, 84-95, 97, and 98. In some embodiments, the lentiviral vector comprises a nucleotide sequence having any one of SEQ ID NOS: 16-26, 55-65, 74, 81, 82, 84-95, 97, and 98.

[0154] A ninth aspect of the present disclosure is a population of host cells transduced with an expression vector encoding a polypeptide having Formula (IA), e.g., a retroviral vector, a lentiviral vector, etc. In some embodiments, the nucleotide sequence encoding the polypeptide having Formula (IA) is operably linked to a promoter. In some embodiments, the population of transduced host cells expresses a polypeptide having Formula (IA). In some embodiments, the promoter is selected from EF1A, MND, CD11b, CD68Lp, EF1a1, EFS, and UbC. In some embodiments, the lentiviral vector further comprises a UCOE promoter element. In some embodiments, the lentiviral vector further comprises an insulator. In some embodiments, the lentiviral vector further comprises one or more Scaffold/Matrix Attachment Regions. In some embodiments, the lentiviral vector further comprises a WPRE element. In some embodiments, the lentiviral vector does not include a nucleotide sequence encoding a WPRE element. In some embodiments, the host cells are autologous. In some embodiments, the host cells are allogeneic. In some embodiments, the host cells are transduced ex vivo. In some embodiments, the host cells are transduced in vivo.

[0155] A tenth aspect of the present disclosure is a method of treating a mammalian subject, e.g., a human subject, comprising administering a population of transduced host cells to the mammalian subject, the population of transduced host cells expressing a polypeptide having Formula (IA). Examples of polypeptides having Formula (IA) are described herein. In some embodiments, the polypeptide of Formula (IA) has an amino acid sequence having at least 97% identity to any one of 2-8, 44-54, 68, 75, 105, and 116-125. In some embodiments, the polypeptide of Formula (IA) has an amino acid sequence having at least 99% identity to any one of 2-8, 44-54, 68, 75, 105, and 116-125. In some embodiments, the polypeptide of Formula (IA) comprises an amino acid sequence having any one of 2-8, 44-54, 68, 75, 105, and 116-125. In some embodiments, the polypeptide of Formula (IA) is encoded by a nucleotide sequence having at least 95% identity to any one of SEQ ID NOS: 106, 108-115, and 131. In some embodiments, the polypeptide of Formula (IA) is encoded by a nucleotide sequence having at least 97% identity to any one of SEQ ID NOS: 106, 108-115, and 131. In some embodiments, the polypeptide of Formula (IA) is encoded by a nucleotide sequence having at least 99% identity to any one of SEQ ID NOS: 106, 108-115, and 131. In some embodiments, the polypeptide of Formula (IA) is encoded by a nucleotide sequence having any one of SEQ ID NOS: 106, 108-115, and 131.

[0156] In some embodiments, the host cells are autologous. In some embodiments, the host cells are allogeneic. In some embodiments, the mammalian subject was previously treated with, will be treated with, or is concurrently being treated with a polypeptide having an amino acid sequence having SEQ ID NO: 1.

[0157] An eleventh aspect of the present disclosure is a method of treating hypophosphatasia in a mammalian subject comprising administering a therapeutically effective amount of the population of transduced host cells to the mammalian subject, the population of transduced host cells expressing a polypeptide having Formula (IA) to the mammalian subject. Examples of polypeptides having Formula (IA) are described herein. In some embodiments, the polypeptide of Formula (IA) has an amino acid sequence having at least 97% identity to any one of 2-8, 44-54, 68, 75, 105, and 116-125. In some embodiments, the polypeptide of Formula (IA) has an amino acid sequence having at least 99% identity to any one of 2-8, 44-54, 68, 75, 105, and 116-125. In some embodiments, the polypeptide of Formula (IA) comprises an amino acid sequence having any one of 2-8, 44-54, 68, 75, 105, and 116-125. In some embodiments, the polypeptide of Formula (IA) is encoded by a nucleotide sequence having at least 95% identity to any one of SEQ ID NOS: 106, 108-115, and 131. In some embodiments, the polypeptide of Formula (IA) is encoded by a nucleotide sequence having at least 97% identity to any one of SEQ ID NOS: 106, 108-115, and 131. In some embodiments, the polypeptide of Formula (IA) is encoded by a nucleotide sequence having at least 99% identity to any one of SEQ ID NOS: 106, 108-115, and 131. In some embodiments, the polypeptide of Formula (IA) is encoded by a nucleotide sequence having any one of SEQ ID NOS: 106, 108-115, and 131.

[0158] In some embodiments, the host cells are autologous. In some embodiments, the host cells are allogeneic. In some embodiments, the mammalian subject was previously treated with, will be treated with, or is concurrently being treated with a polypeptide having an amino acid sequence having SEQ ID NO: 1.

[0159] A twelfth aspect of the present disclosure is a method of treating, mitigating, or preventing a symptom of hypophosphatasia in a mammalian subject comprising administering a therapeutically effective amount of the population of transduced host cells to the mammalian subject, the population of transduced host cells expressing a polypeptide having Formula (IA) to the mammalian subject. Examples of polypeptides having Formula (IA) are described herein. In some embodiments, the polypeptide of Formula (IA) has an amino acid sequence having at least 97% identity to any one of 2-8, 44-54, 68, 75, 105, and 116-125. In some embodiments, the polypeptide of Formula (IA) has an amino acid sequence having at least 99% identity to any one of 2-8, 44-54, 68, 75, 105, and 116-125. In some embodiments, the polypeptide of Formula (IA) comprises an amino acid sequence having any one of 2-8, 44-54, 68, 75, 105, and 116-125. In some embodiments, the polypeptide of Formula (IA) is encoded by a nucleotide sequence having at least 95% identity to any one of SEQ ID NOS: 106, 108-115, and 131. In some embodiments, the polypeptide of Formula (IA) is encoded by a nucleotide sequence having at least 97% identity to any one of SEQ ID NOS: 106, 108-115, and 131. In some embodiments, the polypeptide of Formula (IA) is encoded by a nucleotide sequence having at least 99% identity to any one of SEQ ID NOS: 106, 108-115, and 131. In some embodiments, the polypeptide of Formula (IA) is encoded by a nucleotide sequence having any one of SEQ ID NOS: 106, 108-115, and 131.

[0160] In some embodiments, the host cells are autologous. In some embodiments, the host cells are allogeneic. In some embodiments, the mammalian subject was previously treated with, will be treated with, or is concurrently being treated with a polypeptide having an amino acid sequence having SEQ ID NO: 1.

[0161] A thirteenth aspect of the present disclosure is a polypeptide comprising Formula (VB):

([A]-[B])-[R]_{q}-([E]_{y}) (VB)
[0162] wherein
[0163] A comprises an amino acid sequence encoding a secretion signal peptide;
[0164] B comprises an amino acid encoding an alkaline phosphatase;
[0165] R is -(Mₒ(Fc)Nₚ)-, where M and N each independently include between 1 and 6 amino acids, where Fc is a Fc domain, and o and p are each independently 0, 1, or 2;
[0166] q is 0 or 1;
[0167] E comprises an amino acid sequence having between 2 and 4 amino acids; and
[0168] y is integer ranging from 1 to 16,
[0169] provided that when q is 1 and when [E] comprises only aspartic acid, then the polypeptide of Formula (VB) does not terminate in an amino acid sequence having ten to sixteen contiguous aspartic acid residues.

[0170] In some embodiments, the polypeptide is catalytically competent to allow formation of hydroxyapatite crystals, such as in bone. In some embodiments, the polypeptide is capable of catalyzing the cleavage of inorganic pyrophosphate.

[0171] In some embodiments, y is an integer ranging from 4-8. In some embodiments, y is 6.

[0172] In some embodiments, q is 0.

[0173] In some embodiments, q is 1. In some embodiments, M comprises 2 amino acids; and wherein N comprises two amino acids; and wherein M and N are different. In some embodiments, M is -L-K-. In some embodiments, N is -D-I-.

[0174] In some embodiments, E comprises between 2 and 4 amino acids. In some embodiments, E comprises 3 amino acids. In some embodiments, at least 2 contiguous amino acids of the 3 amino acids are the same. In some embodiments, E comprises -D-S-S-.

[0175] In some embodiments, B comprises at least 99% sequence identity to SEQ ID NO: 11. In some embodiments, B comprises SEQ ID NO: 11. In some embodiments, [A]ᵥ-[B]-[C]_{w} comprises an amino acid sequence having at least 99% sequence identity to SEQ ID NO: 10. In some embodiments, [A]ᵥ-[B]-[C]_{w} comprises SEQ ID NO: 10.

[0176] In some embodiments, A comprises an amino acid sequence having at least 99% identity to any one of SEQ ID NOS: 12 and 33-43. In some embodiments, A comprises an amino acid sequence having any one of SEQ ID NOS: 12 and 33-43.

[0177] In some embodiments, Fc comprises at least 97% identity to that of SEQ ID NO: 130. In some embodiments, Fc comprises at least 98% identity to that of SEQ ID NO: 130. In some embodiments, Fc comprises at least 99% identity to that of SEQ ID NO: 130. In some embodiments, Fc comprises SEQ ID NO: 130. In some embodiments, R comprises at least 97% identity to SEQ ID NO: 9. In some embodiments, R comprises at least 98% identity to SEQ ID NO: 9. In some embodiments, R comprises at least 99% identity to SEQ ID NO: 9. In some embodiments, R comprises SEQ ID NO: 9.

[0178] A fourteenth aspect of the present disclosure is a lentiviral vector including a nucleotide sequence encoding a polypeptide having Formula (VB). Examples of polypeptides having Formula (VB) are described herein. In some embodiments, the polypeptide of Formula (VB) has an amino acid sequence having at least 90% identity to any one of 5, 44-54, 68, 75, 105, and 116-125. In some embodiments, the polypeptide of Formula (VB) has an amino acid sequence having at least 95% identity to any one of 5, 44-54, 68, 75, 105, and 116-125. In some embodiments, the polypeptide of Formula (VB) has an amino acid sequence having at least 96% identity to any one of 5, 44-54, 68, 75, 105, and 116-125. In some embodiments, the polypeptide of Formula (VB) has an amino acid sequence having at least 97% identity to any one of 5, 44-54, 68, 75, 105, and 116-125. In some embodiments, the polypeptide of Formula (VB) has an amino acid sequence having at least 98% identity to any one of 5, 44-54, 68, 75, 105, and 116-125. In some embodiments, the polypeptide of Formula (VB) has an amino acid sequence having at least 99% identity to any one of 5, 44-54, 68, 75, 105, and 116-125. In some embodiments, the polypeptide of Formula (VB) comprises an amino acid sequence having any one of 5, 44-54, 68, 75, 105, and 116-125.

[0179] In some embodiments, the polypeptide having Formula (VB) is encoded by a nucleotide sequence having at least 90% identity to any one of SEQ ID NOS: 111, 115, and 131. In some embodiments, the polypeptide having Formula (VB) is encoded by a nucleotide sequence having at least 95% identity to any one of SEQ ID NOS: 111, 115, and 131. In some embodiments, the polypeptide having Formula (VB) is encoded by a nucleotide sequence having at least 96% identity to any one of SEQ ID NOS: 111, 115, and 131. In some embodiments, the polypeptide having Formula (VB) is encoded by a nucleotide sequence having at least 97% identity to any one of SEQ ID NOS: 111, 115, and 131. In some embodiments, the polypeptide having Formula (VB) is encoded by a nucleotide sequence having at least 98% identity to any one of SEQ ID NOS: 111, 115, and 131. In some embodiments, the polypeptide having Formula (VB) is encoded by a nucleotide sequence having at least 99% identity to any one of SEQ ID NOS: 111, 115, and 131. In some embodiments, the polypeptide having Formula (VB) is encoded by a nucleotide sequence having any one of SEQ ID NOS: 111, 115, and 131.

[0180] In some embodiments, the nucleotide sequence encoding the polypeptide having Formula (VB) is operably linked to a promoter. In some embodiments, the promoter is selected from EF1A, MND, CD11b, CD68Lp, EF1a1, EFS, and UbC. In some embodiments, the lentiviral vector further comprises a UCOE promoter element. In some embodiments, the promoter has at least 95% identity to any one of SEQ ID NOS: 66, 67, 96, 99, 100, 101, and 126. In some embodiments, the promoter has at least 96% identity to any one of SEQ ID NOS: 66, 67, 96, 99, 100, 101, and 126. In some embodiments, the promoter has at least 97% identity to any one of SEQ ID NOS: 66, 67, 96, 99, 100, 101, and 126. In some embodiments, the promoter has at least 95% identity to any one of SEQ ID NOS: 66, 67, 96, 99, 100, 101, and 126. In some embodiments, the promoter has at least 98% identity to any one of SEQ ID NOS: 66, 67, 96, 99, 100, 101, and 126. In some embodiments, the promoter has at least 99% identity to any one of SEQ ID NOS: 66, 67, 96, 99, 100, 101, and 126. In some embodiments, the promoter comprises any one of SEQ ID NOS: 66, 67, 96, 99, 100, 101, and 126.

[0181] In some embodiments, the lentiviral vector further comprises an insulator. In some embodiments, the lentiviral vector further comprises one or more Scaffold/Matrix Attachment Regions. In some embodiments, the lentiviral vector further comprises a WPRE element. In some embodiments, the lentiviral vector further comprises a WPRE element.

[0182] A fifteenth aspect of the present disclosure is a method of treating a mammalian subject, e.g., a human subject, comprising administering a population of transduced host cells to the mammalian subject, the population of transduced host cells expressing a polypeptide having Formula (VB). Examples of polypeptides having Formula (VB) are described herein. In some embodiments, the polypeptide of Formula (VB) has an amino acid sequence having at least 97% identity to any one of 5, 44-54, 68, 75, 105, and 116-125. In some embodiments, the polypeptide of Formula (VB) has an amino acid sequence having at least 99% identity to any one of 5, 44-54, 68, 75, 105, and 116-125. In some embodiments, the polypeptide of Formula (VB) comprises an amino acid sequence having any one of 5, 44-54, 68, 75, 105, and 116-125. In some embodiments, the host cells are autologous. In some embodiments, the host cells are allogeneic. In some embodiments, the mammalian subject was previously treated with, will be treated with, or is concurrently being treated with a polypeptide having an amino acid sequence having SEQ ID NO: 1.

[0183] An sixteenth aspect of the present disclosure is a method of treating hypophosphatasia in a mammalian subject comprising administering a therapeutically effective amount of the population of transduced host cells to the mammalian subject, the population of transduced host cells expressing a polypeptide having Formula (VB) to the mammalian subject. Examples of polypeptides having Formula (VB) are described herein. In some embodiments, the polypeptide of Formula (VB) has an amino acid sequence having at least 97% identity to any one of 5, 44-54, 68, 75, 105, and 116-125. In some embodiments, the polypeptide of Formula (VB) has an amino acid sequence having at least 99% identity to any one of 5, 44-54, 68, 75, 105, and 116-125. In some embodiments, the polypeptide of Formula (VB) comprises an amino acid sequence having any one of 5, 44-54, 68, 75, 105, and 116-125. In some embodiments, the host cells are autologous. In some embodiments, the host cells are allogeneic. In some embodiments, the mammalian subject was previously treated with, will be treated with, or is concurrently being treated with a polypeptide having an amino acid sequence having SEQ ID NO: 1.

[0184] A seventeenth aspect of the present disclosure is a method of treating, mitigating, or preventing a symptom of hypophosphatasia in a mammalian subject comprising administering a therapeutically effective amount of the population of transduced host cells to the mammalian subject, the population of transduced host cells expressing a polypeptide having Formula (VB) to the mammalian subject. Examples of polypeptides having Formula (VB) are described herein. In some embodiments, the polypeptide of Formula (VB) has an amino acid sequence having at least 97% identity to any one of 5, 44-54, 68, 75, 105, and 116-125. In some embodiments, the polypeptide of Formula (VB) has an amino acid sequence having at least 99% identity to any one of 5, 44-54, 68, 75, 105, and 116-125. In some embodiments, the polypeptide of Formula (VB) comprises an amino acid sequence having any one of 5, 44-54, 68, 75, 105, and 116-125. In some embodiments, the host cells are autologous. In some embodiments, the host cells are allogeneic. In some embodiments, the mammalian subject was previously treated with, will be treated with, or is concurrently being treated with a polypeptide having an amino acid sequence having SEQ ID NO: 1.

[0185] An eighteenth aspect of the present disclosure is a method of treating a condition or disease related to a bone defect characterized by a lack of or an insufficient amount of functional alkaline phosphatase comprising: administering a therapeutically effective amount of transduced host cells expressing a polypeptide having any one of Formulas (I), (IA), (IB), (II), (III), (IV), (VA), and (VB) (such as described herein). In some embodiments, the expressed polypeptide has an amino acid sequence having at least 97% identity to any one of 2-8, 44-54, 68, 75, 105, and 116-125. In some embodiments, the expressed polypeptide has an amino acid sequence having at least 99% identity to any one of 2-8, 44-54, 68, 75, 105, and 116-125. In some embodiments, the expressed polypeptide comprises an amino acid sequence having any one of 2-8, 44-54, 68, 75, 105, and 116-125. In some embodiments, the expressed polypeptide is encoded by a nucleotide sequence having at least 95% identity to any one of SEQ ID NOS: 106, 108-115, and 131. In some embodiments, the expressed polypeptide is encoded by a nucleotide sequence having at least 97% identity to any one of SEQ ID NOS: 106, 108-115, and 131. In some embodiments, the expressed polypeptide is encoded by a nucleotide sequence having at least 99% identity to any one of SEQ ID NOS: 106, 108-115, and 131. In some embodiments, the expressed polypeptide is encoded by a nucleotide sequence having any one of SEQ ID NOS: 106, 108-115, and 131.

[0186] In some embodiments, the host cells are transduced with an expression vector, e.g., a retroviral expression vector or a lentiviral expression vector, wherein the expression vector comprises a nucleotide encoding a polypeptide having any one of Formulas (I), (IA), (IB), (II), (III), (IV), (VA), and (VB) (such as described herein). In some embodiments, the nucleotide sequence encoding the polypeptide having any one of Formulas (I), (IA), (IB), (II), (III), (IV), (VA), and (VB) is operably linked to a promoter. In some embodiments, the promoter is selected from EF1A, MND, CD11b, CD68Lp, EF1a1, EFS, and UbC. In some embodiments, the lentiviral vector further comprises a UCOE promoter element. In some embodiments, the lentiviral vector further comprises an insulator. In some embodiments, the lentiviral vector further comprises one or more Scaffold/Matrix Attachment Regions. In some embodiments, the lentiviral vector further comprises a WPRE element. In some embodiments, the lentiviral vector further comprises a WPRE element. In some embodiments, the transduction of the host cells occurs ex vivo. In some embodiments, the transduction of the host cells occurs in vivo. In some embodiments, the host cells are autologous. In some embodiments, the host cells are allogeneic. In some embodiments, the mammalian subject was previously treated with, will be treated with, or is concurrently being treated with a polypeptide having an amino acid sequence having SEQ ID NO: 1.

[0187] A nineteenth aspect of the present disclosure is a polypeptide comprising Formula (I):

[A]ᵥ-[B]-[C]_{w}-[R]_{q}-([D]ₓ-[E]_{y})_{z}, (IB)
[0188] wherein
[0189] A comprises an amino acid sequence encoding a secretion signal peptide;
[0190] B comprises an amino acid encoding an alkaline phosphatase;
[0191] C comprises an amino acid sequence encoding a GPI anchor;
[0192] R is -(Mₒ(Fc)Nₚ)-, where M and N each independently include between 1 and 6 amino acids, where Fc is a Fc domain, and o and p are each independently 0, 1, or 2;
[0193] D comprises an amino acid sequence having between 4 and 6 amino acids, or is F(G)ₜF, where each F is the same amino acid, G is an amino acid sequence having 3, 4, or 5 amino acids, and t is an integer ranging from 2-5;
[0194] E comprises an amino acid sequence having between 1 and 8 amino acids;
[0195] q is 0 or 1;
[0196] v is 0 or 1;
[0197] w is 0 or 1;
[0198] x is 0 or an integer ranging from 1 to 6;
[0199] y is 0 or an integer ranging from 1 to 16; and
[0200] z is 0 or an integer ranging from 1 to 6;
[0201] provided that when v is 1, w is 0, q is 1, o is 1, p is 1, N is the diamino acid -D-I-, M is the diamino acid -L-K-, [B] comprises SEQ ID NO: 11, Fc comprises SEQ ID NO: 130, and x is 0, then [E]_{y} does not comprise between ten and sixteen contiguous aspartic acid residues.

[0202] In some embodiments, E comprises between 2 and 4 amino acids. In some embodiments, E comprises 3 amino acids. In some embodiments, at least 2 contiguous amino acids of the 3 amino acids are the same. In some embodiments, E comprises -D-S-S-.

[0203] In some embodiments, q is 0.

[0204] In some embodiments, q is 1.

[0205] In some embodiments, x is 0. In some embodiments, z is 1. In some embodiments, y ranges from 4-8. In some embodiments, y is 6.

[0206] In some embodiments, [E]_{y} is [-D-S-S-]₆.

[0207] In some embodiments, q is 0 and x is 0.

[0208] In some embodiments, q is 1 and [R] is -[L-K]-Fc-[D-I]-, and wherein Fc comprises at least 97% identity to SEQ ID NO: 130. In some embodiments, q is 1 and [R] is -[L-K]-Fc-[D-I]-, and wherein Fc comprises at least 98% identity to SEQ ID NO: 130. In some embodiments, q is 1 and [R] is -[L-K]-Fc-[D-I]-, and wherein Fc comprises at least 99% identity to SEQ ID NO: 130. In some embodiments, [R] comprises SEQ ID NO: 9.

[0209] In some embodiments, the polypeptide has an amino acid sequence having at least 90% identity to any one of 2-8, 44-54, 68, 75, 105, and 116-125. In some embodiments, the polypeptide has an amino acid sequence having at least 95% identity to any one of 2-8, 44-54, 68, 75, 105, and 116-125. In some embodiments, the polypeptide has an amino acid sequence having at least 96% identity to any one of 2-8, 44-54, 68, 75, 105, and 116-125. In some embodiments, the polypeptide has an amino acid sequence having at least 97% identity to any one of 2-8, 44-54, 68, 75, 105, and 116-125. In some embodiments, the polypeptide has an amino acid sequence having at least 98% identity to any one of 2-8, 44-54, 68, 75, 105, and 116-125. In some embodiments, the polypeptide has an amino acid sequence having at least 99% identity to any one of 2-8, 44-54, 68, 75, 105, and 116-125. In some embodiments, the polypeptide comprises an amino acid sequence having any one of 2-8, 44-54, 68, 75, 105, and 116-125.

[0210] In some embodiments, the polypeptide is encoded by a nucleotide sequence having at least 90% identity to any one of SEQ ID NOS: 106, 108-115, and 131. In some embodiments, the polypeptide is encoded by a nucleotide sequence having at least 95% identity to any one of SEQ ID NOS: 106, 108-115, and 131. In some embodiments, the polypeptide is encoded by a nucleotide sequence having at least 96% identity to any one of SEQ ID NOS: 106, 108-115, and 131. In some embodiments, the polypeptide is encoded by a nucleotide sequence having at least 97% identity to any one of SEQ ID NOS: 106, 108-115, and 131. In some embodiments, the polypeptide is encoded by a nucleotide sequence having at least 98% identity to any one of SEQ ID NOS: 106, 108-115, and 131. In some embodiments, the polypeptide is encoded by a nucleotide sequence having at least 99% identity to any one of SEQ ID NOS: 106, 108-115, and 131. In some embodiments, the polypeptide is encoded by a nucleotide sequence having any one of SEQ ID NOS: 106, 108-115, and 131.

[0211] A twentieth aspect of the present disclosure is an expression vector comprising a nucleic acid sequence encoding a polypeptide having at least 90% identity to any one of SEQ ID NOS: 1-8, 44-54, 68, 75, 105, and 116-125. In some embodiments, the polypeptide has at least 91% identity to any one of SEQ ID NOS: 1-8, 44-54, 68, 75, 105, and 116-125. In some embodiments, the polypeptide has at least 92% identity to any one of SEQ ID NOS: 1-8, 44-54, 68, 75, 105, and 116-125. In some embodiments, the polypeptide has at least 93% identity to any one of SEQ ID NOS: 1-8, 44-54, 68, 75, 105, and 116-125. In some embodiments, the polypeptide has at least 94% identity to any one of SEQ ID NOS: 1-8, 44-54, 68, 75, 105, and 116-125. In some embodiments, the polypeptide has at least 95% identity to any one of SEQ ID NOS: 1-8, 44-54, 68, 75, 105, and 116-125. In some embodiments, the polypeptide has at least 96% identity to any one of SEQ ID NOS: 1-8, 44-54, 68, 75, 105, and 116-125. In some embodiments, the polypeptide has at least 97% identity to any one of SEQ ID NOS: 1-8, 44-54, 68, 75, 105, and 116-125. In some embodiments, the polypeptide has at least 98% identity to any one of SEQ ID NOS: 1-8, 44-54, 68, 75, 105, and 116-125. In some embodiments, the polypeptide has at least 99% identity to any one of SEQ ID NOS: 1-8, 44-54, 68, 75, 105, and 116-125. In some embodiments, the polypeptide has any one of SEQ ID NOS: 1-8, 44-54, 68, 75, 105, and 116-125. In some embodiments, the expression vector is a retroviral vector. In some embodiments, the retroviral vector is a lentiviral vector. In some embodiments, the expression vector is an AAV vector.

[0212] A twenty-first aspect of the present disclosure is an isolated nucleotide sequence having at least 90% identity to any one of SEQ ID NOS: 111, 115, and 131 (e.g., 91% identity, 92% identity, 93% identity, 94% identity, 95% identity, 96% identity, 97% identity, 98% identity, 99% identity, 100% identity).

[0213] A twenty-second aspect of the present disclosure is an isolated nucleotide sequence comprising at least first and second nucleotide sequences, wherein the first nucleotide sequence comprises at least 90% identity to SEQ ID NO: 115 (e.g., 91% identity, 92% identity, 93% identity, 94% identity, 95% identity, 96% identity, 97% identity, 98% identity, 99% identity, 100% identity); and wherein the second nucleotide sequence encodes for a signal peptide. In some embodiments, the signal peptide has at least 95% identity (e.g., 96% identity, 97% identity, 98% identity, 99% identity, 100% identity) to any one of SEQ ID NOS: 12 and 33-43.

[0214] A twenty-third aspect of the present disclosure is a lentiviral vector comprising: (i) a first nucleotide sequence having at least 90% identity to SEQ ID NO: 115 (e.g., 95% identity, 97% identity, 99% identity, 100% identity); and (ii) a second nucleotide sequence encoding a signal peptide. In some embodiments, the signal peptide comprises an amino acid sequence having at least 95% identity (e.g., 96% identity, 97% identity, 98% identity, 99% identity, 100% identity) to any one of SEQ ID NOS: 12 and 33-43. In some embodiments, the lentiviral vector further comprises a third nucleotide sequence encoding a promoter, such as a promoter operably linked to the first nucleotide sequence. In some embodiments, the promoter is selected from the group consisting of EF1A, MND, CD11b, CD68Lp, EF1a1, EFS, and UbC. In some embodiments, the promoter has at least 95% identity to any one of SEQ ID NOS: 66, 67, 96, 99, 100, 101, and 126. In some embodiments, the promoter has at least 96% identity to any one of SEQ ID NOS: 66, 67, 96, 99, 100, 101, and 126. In some embodiments, the promoter has at least 97% identity to any one of SEQ ID NOS: 66, 67, 96, 99, 100, 101, and 126. In some embodiments, the promoter has at least 95% identity to any one of SEQ ID NOS: 66, 67, 96, 99, 100, 101, and 126. In some embodiments, the promoter has at least 98% identity to any one of SEQ ID NOS: 66, 67, 96, 99, 100, 101, and 126. In some embodiments, the promoter has at least 99% identity to any one of SEQ ID NOS: 66, 67, 96, 99, 100, 101, and 126. In some embodiments, the promoter comprises any one of SEQ ID NOS: 66, 67, 96, 99, 100, 101, and 126.

[0215] A twenty-fourth aspect of the present disclosure is a population of host cells transduced with a lentiviral vector, wherein the lentiviral vector comprises a first nucleotide sequence having at least 90% identity to SEQ ID NO: 115 (e.g., 95% identity, 97% identity, 99% identity, 100% identity); and a second nucleotide sequence encoding a signal peptide. In some embodiments, the signal peptide comprises an amino acid sequence having at least 95% identity (e.g., 96% identity, 97% identity, 98% identity, 99% identity, 100% identity) to any one of SEQ ID NOS: 12 and 33-43. In some embodiments, the lentiviral vector further comprises a third nucleotide sequence encoding a promoter. In some embodiments, the promoter is selected from the group consisting of EF1A, MND, CD11b, CD68Lp, EF1a1, EFS, and UbC. In some embodiments, the host cells are transduced ex vivo. In some embodiments, the host cells are transduced in vivo.

[0216] A twenty-fifth aspect of the present disclosure is an isolated nucleotide sequence comprising at least 97% identity (e.g., 98% identity, 99% identity, 100% identity) to that of SEQ ID NO: 111.

[0217] A twenty-sixth aspect of the present disclosure is an amino acid sequence having at least 80% identity (e.g., 90% identity, 95% identity, 97% identity, 99% identity, 100% identity) to SEQ ID NO: 75.

[0218] A twenty-seventh aspect of the present disclosure is a polypeptide comprising at least first and second portions, wherein the first portion comprises an amino acid sequence having at least 95% identity (e.g., 96% identity, 97% identity, 98% identity, 99% identity, 100% identity) to any one of SEQ ID NOS: 4-8 and 44-54; and wherein the second portion comprises an amino acid sequence encoding an Fc domain. In some embodiments, the amino acid sequence encoding the Fc domain comprises at least 95% identity (e.g., 96% identity, 97% identity, 98% identity, 99% identity, 100% identity) to SEQ ID NO: 130.

[0219] A twenty-eighth aspect of the present disclosure is an isolated nucleotide sequence comprising at least 90% identity to SEQ ID NO: 72. In some embodiments, the isolated nucleotide sequence comprises at least 95% identity to SEQ ID NO: 72. In some embodiments, the isolated nucleotide sequence comprises at least 96% identity to SEQ ID NO: 72. In some embodiments, the isolated nucleotide sequence comprises at least 97% identity to SEQ ID NO: 72. In some embodiments, the isolated nucleotide sequence comprises at least 98% identity to SEQ ID NO: 72. In some embodiments, the isolated nucleotide sequence comprises at least 99% identity to SEQ ID NO: 72.

[0220] A twenty-ninth aspect of the present disclosure is an isolated nucleotide sequence comprising SEQ ID NO: 72.

[0221] A thirtieth aspect of the present disclosure is a polypeptide comprising an alkaline phosphatase coupled to a bone-targeting moiety. In some embodiments, a nucleotide sequence of the bone-targeting moiety comprises at least 90% identity (e.g., 91% identity, 92% identity, 93% identity, 94% identity, 955 identity, 96% identity, 97% identity, 98% identity, 99% identity, 100% identity) to SEQ ID NO: 72. In some embodiments, the alkaline phosphatase comprises an amino acid sequence having at least 90% identity (e.g., 91% identity, 92% identity, 93% identity, 94% identity, 955 identity, 96% identity, 97% identity, 98% identity, 99% identity, 100% identity) to SEQ ID NO: 11. In some embodiments, the alkaline phosphatase is coupled to the bone-targeting sequence via a peptide linker. In some embodiments, the peptide linker comprises (GGGGS)ₙ, wherein n ranges from 1 to 10. In some embodiments, is ranges from 2-8. In some embodiments, n is 2. In some embodiments, the polypeptide further comprises an Fc domain. In some embodiments, the Fc domain comprises at least 95% identity (e.g., 96% identity, 97% identity, 98% identity, 99% identity, 100% identity) to SEQ ID NO: 130.

[0222] A thirty-first aspect of the present disclosure is a lentiviral vector comprising a first nucleotide sequence encoding an alkaline phosphatase coupled to a bone-targeting moiety, wherein the first nucleotide sequence is operably linked to a promoter. In some embodiments, a nucleotide sequence of the bone-targeting moiety comprises at least 90% identity (e.g., 91% identity, 92% identity, 93% identity, 94% identity, 955 identity, 96% identity, 97% identity, 98% identity, 99% identity, 100% identity) to SEQ ID NO: 72. In some embodiments, the alkaline phosphatase comprises an amino acid sequence having at least 90% identity (e.g., 91% identity, 92% identity, 93% identity, 94% identity, 955 identity, 96% identity, 97% identity, 98% identity, 99% identity, 100% identity) to SEQ ID NO: 11. In some embodiments, the promoter is selected from the group consisting of EF1A, MND, CD11b, CD68Lp, EF1a1, EFS, and UbC. In some embodiments, the promoter has at least 95% identity to any one of SEQ ID NOS: 66, 67, 96, 99, 100, 101, and 126. In some embodiments, the promoter has at least 96% identity to any one of SEQ ID NOS: 66, 67, 96, 99, 100, 101, and 126. In some embodiments, the promoter has at least 97% identity to any one of SEQ ID NOS: 66, 67, 96, 99, 100, 101, and 126. In some embodiments, the promoter has at least 95% identity to any one of SEQ ID NOS: 66, 67, 96, 99, 100, 101, and 126. In some embodiments, the promoter has at least 98% identity to any one of SEQ ID NOS: 66, 67, 96, 99, 100, 101, and 126. In some embodiments, the promoter has at least 99% identity to any one of SEQ ID NOS: 66, 67, 96, 99, 100, 101, and 126. In some embodiments, the promoter comprises any one of SEQ ID NOS: 66, 67, 96, 99, 100, 101, and 126.

[0223] A thirty-second aspect of the present disclosure is a host cell transduced with a lentiviral vector comprising a first nucleotide sequence encoding an alkaline phosphatase coupled to a bone-targeting moiety, wherein the first nucleotide sequence is operably linked to a promoter. In some embodiments, a nucleotide sequence of the bone-targeting moiety comprises at least 90% identity (e.g., 91% identity, 92% identity, 93% identity, 94% identity, 955 identity, 96% identity, 97% identity, 98% identity, 99% identity, 100% identity) to SEQ ID NO: 72. In some embodiments, the alkaline phosphatase comprises at least 90% identity (e.g., 91% identity, 92% identity, 93% identity, 94% identity, 955 identity, 96% identity, 97% identity, 98% identity, 99% identity, 100% identity) to SEQ ID NO: 11. In some embodiments, the promoter is selected from the group consisting of EF1A, MND, CD11b, CD68Lp, EF1a1, EFS, and UbC. In some embodiments, the host cells are transduced ex vivo. In some embodiments, the host cells are transduced in vivo.

[0224] A thirty-third aspect of the present disclosure is a pharmaceutical composition comprising a polypeptide, wherein the polypeptide comprises an alkaline phosphatase coupled to a bone-targeting moiety. In some embodiments, a nucleotide sequence of the bone-targeting moiety comprises at least 90% identity (e.g., 91% identity, 92% identity, 93% identity, 94% identity, 955 identity, 96% identity, 97% identity, 98% identity, 99% identity, 100% identity) to SEQ ID NO: 72. In some embodiments, the alkaline phosphatase comprises at least 90% identity (e.g., 91% identity, 92% identity, 93% identity, 94% identity, 955 identity, 96% identity, 97% identity, 98% identity, 99% identity, 100% identity) to SEQ ID NO: 11. In some embodiments, the pharmaceutical composition is used to treat hypophosphatasia in a mammal in need of treatment thereof. In some embodiments, the pharmaceutical composition is used to mitigate or prevent a symptom of hypophosphatasia in a mammal in need of treatment thereof.

### BRIEF DESCRIPTION OF THE FIGURES

[0225] For a general understanding of the features of the disclosure, reference is made to the drawings. In the drawings, like reference numerals have been used throughout to identify identical elements.

[0226] FIG. 1 sets forth a vector map of a lentiviral vector comprising a nucleic acid sequence encoding an alkaline phosphatase, which polypeptide includes a secretion signal peptide, but does not include a GPI anchor. The polypeptide, in some embodiments, further includes a linker, an Fc domain, and a peptide having ten aspartic acid residues.

[0227] FIG. 2 sets forth a vector map of a lentiviral vector comprising a nucleic acid sequence encoding a polypeptide (SEQ ID NO: 2).

[0228] FIG. 3 sets forth a vector map of a lentiviral vector comprising a nucleic acid sequence encoding a polypeptide (SEQ ID NO: 3).

[0229] FIG. 4 sets forth a vector map of a lentiviral vector comprising a nucleic acid sequence encoding a polypeptide (SEQ ID NO: 4).

[0230] FIG. 5 sets forth a vector map of a lentiviral vector comprising a nucleic acid sequence encoding a polypeptide (SEQ ID NO: 5).

[0231] FIG. 6 sets forth a vector map of a lentiviral vector comprising a nucleic acid sequence encoding a polypeptide (SEQ ID NO: 6).

[0232] FIG. 7 sets forth a vector map of a lentiviral vector comprising a nucleic acid sequence encoding a polypeptide (SEQ ID NO: 7).

[0233] FIG. 8 sets forth a vector map of a lentiviral vector comprising a nucleic acid sequence encoding a polypeptide (SEQ ID NO: 8).

[0234] FIG. 9 sets forth a vector map of a lentiviral vector comprising a nucleic acid sequence encoding a polypeptide including a tissue non-specific alkaline phosphatase, and which polypeptide includes a secretion signal peptide and a GPI anchor.

[0235] FIG. 10 provides data demonstrating cell proliferation and viability in the presence of various concentration of sTNSALP-(DSS)6 RMP005 compound, by analyzing MTT (344,5-dimethyl-2-thiazolyl)-2,5-diphenyl-2H-tetrazolium bromide) incorporation into viable cells. Briefly, plated cells were incubated with about 0.25 mg/ml MTT solution for about 3 h at about 37° C. After incubation, precipitate was dissolved in DMSO. Spectrophotometric measurements were done using 560 nm wavelength in a microplate reader. Data show no toxic effect of RMP005 to the cells even at the highest concentration (10 U/ml).

[0236] FIG. 11 provides visualization of mineralization induced by of sTNSALP-(DSS)6 (RMP-005) (right panel). To document a potential mineralization inhibition/rescue a cell culture was initiated in differentiation medium (including ascorbic acid (AA) and a source of phosphate (β-glycerophosphate; βGP). At day 4 various concentrations of sTNSALP-(DSS)6 (RMP-005), 0.1, 0.5, and 1.0 unit/ml were added to the culture medium with or without the mineralization inhibitor sodium pyrophosphate tetrabasic (PPi) at a concentration of about 2.5 μM for the remainder of culture period (10 days). Mineral was visualized by von Kossa staining. Quantification of mineralization is provided in the left panel, wherein insoluble calcium deposited into the extracellular matrix (ECM) was first dissolved with about 0.5 M HCl and spectrophotometrically quantitated in the supernatant (wavelength about 595 nm) using commercially available calcium assay kit. RMP005 compound rescued the PPi induced inhibition of cell mineralization even at the lowest concentration (about 0.1 U/ml). A dose range effect on deposited calcium concentration showing complete rescue of mineralization at about 1.0 U/mL.

[0237] FIG. 12 compares in vitro hydroxyapatite (HA) binding for compounds “RMP-002” (SEQ ID NO: 2) and RMP-005 (SEQ ID NO: 5). Untagged sTNSALP (RMP-002) and tagged sTNSALP-(DSS)6 (“RMP005”) were subjected to a pulldown assay (supernatant depletion by mineral (HA)) as follows: Hydroxyapatite crystal solution (Berkeley, 5 μM) (HA) was prepared in 20 mM Tris (pH 7.4); 150 mM NaCl and allowed to equilibrate overnight at room temperature with gentle agitation. The next day, “RMP002” and “RMP005” were incubated with, or without, 0.3 mg HA at different concentration 0.5, 1.0, 5.0, 10.0 and 15.0 μg/ml and allowed to bind for one hour at room temperature on a shaker. Tubes were spun down at about 10,000×g for about 5 min, and the supernatant was used to measure the alkaline phosphatase level for each sample. A standard colorimetric method where alkaline phosphatase is used as a standard and p-nitrophenylphosphate as a phosphatase substrate, turns yellow when dephosphorylated by alkaline phosphatase, and was measured at 405 nm wavelength. Results show strong preferential binding of the tagged “RMP-005” over its non-tagged counterpart (“RMP002”).

[0238] FIG. 13 illustrates secreted TNALP activity in supernatant of 293 cells transfected with DNA constructs with wildtype and IgG2G secretion signal peptide. FIG. 13 illustrates that a construct with a secretion signal peptide of IgG2H has greater than 6-fold of secreted TNALP activity as compared with two constructs having the original secretion signal peptide (see SEQ ID NO: 12) including an EF1a promoter and an MND promoter.

[0239] FIG. 14 illustrates pharmacokinetic data for all of the test articles expressed in μg/mL (SEQ ID NOS: 1-8).

[0240] FIG. 15 provides a comparison of PK curves for RMP-001, RMP-005, RMP-006 and RMP-008 (corresponding to SEQ ID NOS: 1, 5, 6, and 8, respectively), each described herein.

[0241] FIG. 16 provides a comparison of PK curves for RMP-001, RMP-004 and RMP-007 (corresponding to SEQ ID NOS: 1, 4, and 7, respectively), each described herein.

[0242] FIG. 17 provides Cmax values (Tmax=5 min) for each of the test articles (SEQ ID NOS: 1-8).

[0243] FIG. 18 sets forth AUCs extrapolated to infinity for all test articles (SEQ ID NOS: 1-8).

[0244] FIG. 19 sets forth the elimination half-lives of the various test articles (SEQ ID NOS: 1-8).

[0245] FIG. 20A sets forth a vector map of RMP-100 (FG12w.MND.kz.IgKVIII.TNALPco(mut-miR362a).Fc.(DSS)6.WPRE) (SEQ ID NO: 74). In particular, this vector is comprised of: (1) Lentiviral vector backbone (HIV-1 sequences) without insulator; (2) Promotor/enhancer elements to drive TNALP mRNA expression; (3) 5 UTR sequences and translation initiation sequences to promote mRNA stability and efficient translation; (4) a human Ig kappa light chain V-III region signal peptide and its linker to promote efficient processing, and secretion of TNALP; (5) Codon-optimized TNALP coding sequences for efficient translation, stability, and enzymatic activity; (6) IgG1 Fc fusion partners and its linker for retention of the secreted protein in the plasma; (7) Bone tags for effective targeting of enzymatic activity to the bone; and (8) 3′ UTR sequences for mRNA stability.

[0246] FIG. 20B provides a schematic of self-inactivating lentiviral vector constructs LVV-RMP100 (used for lot number v1026). FG12w.MND.kz.IgKVIII-sTNALPco(mut-miR362a).Fc.(DSS)6.WPRE (SEQ ID NO: 74). as determined historically. RRE: Rev response elements; cPPT/CTS: central polypurine trace; hIgKVIII: a human Ig kappa light chain V-III region signal peptide; sTNALPco (mut-miR362a): GPI-anchorless secretory form of tissue-nonspecific alkaline phosphatase contained miR362T mut-A; Fc:) IgG1 Fc fusion partners and its linker for retention of the secreted protein in the plasma; (DSS)6: bone surface binding peptide; WPRE: woodchuck post-transcriptional regulatory element; bGH-poly(A) signal: a bovine growth hormone polyadenylation signal.

[0247] FIGS. 21A and 21B illustrate the activity of secreted TNALP from a series of different vectors (namely, EF1a-RMP5 (SEQ ID NO: 19), EF1a-IgG2H-RMP5 (SEQ ID NO: 55), EF1a-SEAP-RMP5 (SEQ ID NO: 65), EF1a-aLA-RMP5 (SEQ ID NO: 64), EF1a-hCD33-RMP5 (SEQ ID NO: 58), EF1a-Secrecon-RMP5 (SEQ ID NO: 60), EF1a-Secrecon-AA-RMP5 (SEQ ID NO: 61), EF1a-mIgKVIII-AA-RMP5 (SEQ ID NO: 62), and EF1a-hIgKVIII-AA-RMP5 (SEQ ID NO: 57)).

[0248] FIG. 22A illustrates TNALP activity secreted per vector copy number (VCN) for 293T cells (where the TNALP was secreted from cells transduced with either EF1a-RMP5 (SEQ ID NO: 19) or EF1a-IgG2H-RMP5 (SEQ ID NO: 55)).

[0249] FIG. 22B illustrates TNALP activity secreted per VCN for Jurkat cells (where the TNALP was secreted from cells transduced with either EF1a-RMP5 (SEQ ID NO: 19) or EF1a-IgG2H-RMP5 (SEQ ID NO: 55).

[0250] FIG. 23A illustrates and an alignment between EF1a-IgG2H-RMP5 (SEQ ID NO: 55), EF1a-IgG2H-RMP5-miR362-A (SEQ ID NO: 81), and EF1a-IgG2H-RMP5-miR362-B (SEQ ID NO: 82).

[0251] FIG. 23B illustrates the TNALP activity secreted from 293T cells transfected with vectors having EF1a-IgG2H-RMP5 (SEQ ID NO: 55), EF1a-IgG2H-RMP5-miR362-A (SEQ ID NO: 81) and EF1a-IgG2H-RMP5-miR362-B (SEQ ID NO: 82)

[0252] FIG. 23C the TNALP activity secreted from 293T cells transfected with EF1a-IgG2H-RMP5 (SEQ ID NO: 55) or EF1a-IgG2H-RMP5-miR362-A (SEQ ID NO: 81).

[0253] FIG. 24 compares TNALP levels secreted from FG12-SD400i-MND-IgKVIII-AA-RMP5-miR362A-Fc-(DSS)6 (SEQ ID NO: 84) with those of FG12-SD400i-MND-Kozak-IgKVIII-AA-RMP5-miR362A-Fc-(DSS)6 (SEQ ID NO: 85).

[0254] FIG. 25A compares measured vector titer for a series of vectors, including EF1a-RMP5 (SEQ ID NO: 19), EF1-IgG2H-RMP5 (SEQ ID NO: 55), EF1a-IgG2H-RMP5-miR-A (SEQ ID NO: 79), I400-MND-IgG2H-RMP5 (SEQ ID NO: 86), EF1-IgG2H-RMP5-Fc (SEQ ID NO: 87), and EF1a-IgKVIII-RMP5 (SEQ ID NO: 57).

[0255] FIG. 25B compares measured ALP activity per VCN for a series of vectors, including EF1a-RMP5 (SEQ ID NO: 19), EF1-IgG2H-RMP5 (SEQ ID NO: 55), EF1a-IgG2H-RMP5-miR-A (SEQ ID NO: 79), I400-MND-IgG2H-RMP5 (SEQ ID NO: 86), EF1-IgG2H-RMP5-Fc (SEQ ID NO: 87), and EF1a-IgKVIII-RMP5 (SEQ ID NO: 57) in HEK293 cell line.

[0256] FIGS. 25C and 25D compare measured TNALP activity per VCN for a series of vectors, including EF1a-RMP5 (SEQ ID NO: 19), EF1-IgG2H-RMP5 (SEQ ID NO: 55), EF1a-IgG2H-RMP5-miR-A (SEQ ID NO: 79), I400-MND-IgG2H-RMP5 (SEQ ID NO: 86), EF1-IgG2H-RMP5-Fc (SEQ ID NO: 87), and EF1a-IgKVIII-RMP5 (SEQ ID NO: 57) in Jurkat and K562 cell lines, respectively.

[0257] FIGS. 25A-25D illustrates that (i) IgG2H is better than TNALP wildtype secretion signal in transduced Jurkat and K562 cells; (ii) the MND promoter with 400-bps insulator (1400-MND-IgG2H-RMP5-SEQ ID NO: 86) outperforms the EF1a promoter (EF1-IgG2H-RMP5-SEQ ID NO: 55) in both hematopoietic cell lines shown in FIGS. 25C&D; (iii) the addition of the Fc fusion partner has minimal impact on TNALP secretion in the three different types of cell lines as there is no significant difference between (EF1-IgG2H-RMP5-SEQ ID NO: 55) and (EF1a-IgG2H-RMP5-Fc-SEQ ID NO: 87) for ALP secretion in FIG. 25B; (iv) the miR362-A mutation EF1a-IgG2H-RMP5-miR-A-SEQ ID NO: 79) performs better than the original construct EF1a-RMP5-SEQ ID NO: 19) in both myeloid cell lines shown in FIGS. 25C&D; and (v) TNALP secretion from IgKVIII (EF1a-IgKVIII-RMP5-SEQ ID NO: 57) is superior to IgG2H (EF1-IgG2H-RMP5-SEQ ID NO: 55) in all three different types of cell lines shown in FIGS. 25 B, C & D.

[0258] FIG. 26A compares measured titer for a series of vectors, including EF1a-IgG2H-RMP5 (SEQ ID NO: 55), EF1-IgG2H-RMP5-Fc (SEQ ID NO: 87), EF1a-IgG2H-sTNALPwt-DSS6 (SEQ ID NO: 88), EF1a-IgG2H-sTNALPwt-Fc-DSS6 (SEQ ID NO: 89), I400-MND-IgKVIII-RMP5(miR-A)-Fc-DSS6 (SEQ ID NO: 84), and I400-MND-kozak-IgKVIII-RMP5(miR-A)-Fc-DSS6 (SEQ ID NO: 85). The combinatory construct including the 400 bps insulator, the MND promoter, the Kozak element, the IgKVIII secretory signal peptide, the miR362-mutation, and Fc domain (I400-MND-kozak-IgKVIII-RMP5(miR-A)-Fc-DSS6 SEQ ID NO: 85) has comparable titer as rest of vectors (SEQ ID NO:55, 87, 88, 84, 89).

[0259] FIG. 26B compares measured ALP per VCN for a series of vectors, including EF1a-IgG2H-RMP5 (SEQ ID NO: 55), EF1-IgG2H-RMP5-Fc (SEQ ID NO: 87), EF1a-IgG2H-sTNALPwt-DSS6 (SEQ ID NO: 88), EF1a-IgG2H-sTNALPwt-Fc-DSS6 (SEQ ID NO: 89), 1400-MND-IgKVIII-RMP5(miR-A)-Fc-DSS6 (SEQ ID NO: 84), and I400-MND-kozak-IgKVIII-RMP5(miR-A)-Fc-DSS6 (SEQ ID NO: 85). The combinatory construct including the 400 bps insulator, the MND promoter, the Kozak element, the IgKVIII secretory signal peptide, the miR362-mutation, and Fc domain (I400-MND-kozak-IgKVIII-RMP5(miR-A)-Fc-DSS6 SEQ ID NO: 85) has highest ALP secretion per VCN among all vectors compared (SEQ ID NO:55, 87, 88, 84, 89) and is almost 30-fold more potent than the vector EF1-IgG2H-RMP5-Fc (SEQ ID NO: 87) based on ALP secretion per VCN.

[0260] FIG. 27 illustrates TNALP secretion per VCN. The results indicate that the combinatory construct including the 400 bps insulator, the MND promoter, the Kozak element, the IgKVIII secretory signal peptide, the miR362-mutation, and Fc domain (I400-MND-kozak-IgKVIII-RMP5(miR-A)-Fc-DSS6 SEQ ID NO: 85) had comparatively increased secretion as compared the I400-MND-IgG2H-RMP5-Fc construct (SEQ ID NO: 87) in 293t cells and in adult mobilized peripheral blood CD34+ hematopoietic stem cells.

[0261] FIG. 28 compares measured TNALP secretion per VCN for three different vectors, namely, EF1a-IgG2H-RMP5-Fc (SEQ ID NO: 87), EF1a-IgG2H-sTNALPwt-Fc (SEQ ID NO: 88), and i400-MND-kozak-IgKVIII-RMP5(miR-A)-Fc-DSS6 (SEQ ID NO: 85) in three cell lines—Jurkat, HL60 and THP-1.

[0262] FIG. 29 compares measured ALP activity per VCN for four different vectors and mock, namely, 1.EF1a-IgG2H-RMP5-Fc (SEQ ID NO: 87), EF1a-IgG2H-sTNALPwt-Fc (SEQ ID NO: 88), and FIG. 28 compares measured TNALP secretion per VCN for three different vectors, namely, EF1a-IgG2H-RMP5-Fc (SEQ ID NO: 87), EF1a-IgG2H-sTNALPwt-Fc (SEQ ID NO: 88), I400-MND-kozak-IgKVIII-RMP5(miR-A)-Fc-DSS6 (SEQ ID NO: 87), and EF1a-kozak-IgKVIII-RMP5(miR-A)-Fc-DSS6 (SEQ ID NO: 90).

[0263] FIG. 30A illustrate measured ALP activity per VCN in HEK293 for three different vectors, namely LVV-RMP100 v01 (referred as EF1a-IgG2H-RMP5-Fc (SEQ ID NO: 87), LVV-RMP200 v02 (referred as FG12-SD400i-MND-Kozak-IgKVIII-AA-RMP5-miR362-A-Fc-(DSS)6 (SEQ ID NO: 85), and LVV-RMP100 v03 (referred as EF1a-kozak-IgKVIII-RMP5(miR-A)-Fc-DSS6, SEQ ID NO: 90). Results shows potency of FG12-SD400i-MND-Kozak-IgKVIII-AA-RMP5-miR362-A-Fc-(DSS)6 (SEQ ID NO: 85) is about 27 fold of EF1a-IgG2H-RMP5-Fc (SEQ ID NO: 87 and more than 10 fold of EF1a-kozak-IgKVIII-RMP5(miR-A)-Fc-DSS6, SEQ ID NO: 90) in HEK293, respectively. FIGS. 30B & 30C illustrate measured ALP activity per VCN and VCN in one health donor-derived HSC, respectively for three different vectors, namely EF1a-Kozak-IgKVIII-RMP5-miR362-A-Fc-Dss6 (SEQ ID NO: 90), FG12-SD400i-MND-Kozak-IgKVIII-AA-RMP5-miR362-A-Fc-(DSS)6 (SEQ ID NO: 85), and MND-RMP100 (referred as LVV-RMP100 or MND-kozak-IgKVIII-RMP5(miR-A)-Fc-DSS6, SEQ ID NO: 74).

[0264] FIG. 30 B shows potency of FG12-SD400i-MND-Kozak-IgKVIII-AA-RMP5-miR362-A-Fc-(DSS)6 (SEQ ID NO: 85) is about 2 fold of MND-kozak-IgKVIII-RMP5(miR-A)-Fc-DSS6, SEQ ID NO: 74 and about 8 fold of EF1a-kozak-IgKVIII-RMP5(miR-A)-Fc-DSS6, (SEQ ID NO: 90) in HSC, respectively. FIG. 30C showed transduced HSC have similar VCNs between 4 to 10 in this batch of transduction for those 3 vectors.

[0265] FIGS. 31A and 31B illustrate colony formation of HSCs transduced with different vectors, namely (i) I400-MND-RMP100 (referred as i400-MND-kozak-IgKVIII-RMP5(miR-A)-Fc-DSS6, SEQ ID NO: 85), (ii) MND-RMP100 (referred as MND-kozak-IgKVIII-RMP5(miR-A)-Fc-DSS6, SEQ ID NO: 74); and (iii) EF1a-RMP100 (referred as EF1a-kozak-IgKVIII-RMP5(miR-A)-Fc-DSS6, SEQ ID NO: 90). CFU data suggested transduced HSC transduced with MND-400 in-RMP100, EF1a-RMP100 and MND-RMP100 at MOIs from 5 to 20 had similar colony-forming capability compared with mock HSC.

[0266] FIGS. 32A, 32B, 33C, and 33D illustrate the stability of various cell lines transduced with different vectors, namely (i) I400-MND-RMP100 (referred as i400-MND-kozak-IgKVIII-RMP5(miR-A)-Fc-DSS6, SEQ ID NO: 85), (ii) MND-RMP100 (referred as MND-kozak-IgKVIII-RMP5(miR-A)-Fc-DSS6, SEQ ID NO: 74); and (iii) EF1a-RMP100 (referred as EF1a-kozak-IgKVIII-RMP5(miR-A)-Fc-DSS6, SEQ ID NO: 90). All constructs showed robust stability in the transduced cell lines THP-1, HL-60 and Jurkat.

[0267] FIG. 32A illustrates the stability of the THP-1 cell line.

[0268] FIG. 32B illustrates the stability of the Jurkat cell line.

[0269] FIG. 32C illustrates the stability of the HL-60 cell line.

[0270] FIG. 32D illustrates the stability of the Jurkat cell line.

[0271] FIG. 33 provides a vector map of FG12-CD11b-Kozak-IgKVIII-RMP5-miR362-A-Fc-Dss6 (SEQ ID NO: 91).

### DETAILED DESCRIPTION

[0272] It should also be understood that, unless clearly indicated to the contrary, in any methods claimed herein that include more than one step or act, the order of the steps or acts of the method is not necessarily limited to the order in which the steps or acts of the method are recited.

[0273] References in the specification to “one embodiment,” “an embodiment,” “an illustrative embodiment,” etc., indicate that the embodiment described may include a particular feature, structure, or characteristic, but every embodiment may or may not necessarily include that particular feature, structure, or characteristic. Moreover, such phrases are not necessarily referring to the same embodiment. Further, when a particular feature, structure, or characteristic is described in connection with an embodiment, it is submitted that it is within the knowledge of one skilled in the art to affect such feature, structure, or characteristic in connection with other embodiments whether or not explicitly described.

[0274] As used herein, the singular terms “a,” “an,” and “the” include plural referents unless context clearly indicates otherwise. Similarly, the word “or” is intended to include “and” unless the context clearly indicates otherwise. The term “includes” is defined inclusively, such that “includes A or B” means including A, B, or A and B.

[0275] As used herein in the specification and in the claims, “or” should be understood to have the same meaning as “and/or” as defined above. For example, when separating items in a list, “or” or “and/or” shall be interpreted as being inclusive, e.g., the inclusion of at least one, but also including more than one, of a number or list of elements, and, optionally, additional unlisted items. Only terms clearly indicated to the contrary, such as “only one of” or “exactly one of,” or, when used in the claims, “consisting of,” will refer to the inclusion of exactly one element of a number or list of elements. In general, the term “or” as used herein shall only be interpreted as indicating exclusive alternatives (e.g. “one or the other but not both”) when preceded by terms of exclusivity, such as “either,” “one of,” “only one of” or “exactly one of.” “Consisting essentially of,” when used in the claims, shall have its ordinary meaning as used in the field of patent law.

[0276] As used herein, the terms “comprising,” “including,” “having,” and the like are used interchangeably and have the same meaning. Similarly, “comprises,” “includes,” “has,” and the like are used interchangeably and have the same meaning. Specifically, each of the terms is defined consistent with the common United States patent law definition of “comprising” and is therefore interpreted to be an open term meaning “at least the following,” and is also interpreted not to exclude additional features, limitations, aspects, etc. Thus, for example, “a device having components a, b, and c” means that the device includes at least components a, b, and c. Similarly, the phrase: “a method involving steps a, b, and c” means that the method includes at least steps a, b, and c. Moreover, while the steps and processes may be outlined herein in a particular order, the skilled artisan will recognize that the ordering steps and processes may vary.

[0277] As used herein in the specification and in the claims, the phrase “at least one,” in reference to a list of one or more elements, should be understood to mean at least one element selected from any one or more of the elements in the list of elements, but not necessarily including at least one of each and every element specifically listed within the list of elements and not excluding any combinations of elements in the list of elements. This definition also allows that elements may optionally be present other than the elements specifically identified within the list of elements to which the phrase “at least one” refers, whether related or unrelated to those elements specifically identified. Thus, as a non-limiting example, “at least one of A and B” (or, equivalently, “at least one of A or B,” or, equivalently “at least one of A and/or B”) can refer, in one embodiment, to at least one, optionally including more than one, A, with no B present (and optionally including elements other than B); in another embodiment, to at least one, optionally including more than one, B, with no A present (and optionally including elements other than A); in yet another embodiment, to at least one, optionally including more than one, A, and at least one, optionally including more than one, B (and optionally including other elements); etc.

[0278] As used herein, the term “domain” refers to a part of a molecule or structure that shares common physicochemical features, such as, but not limited to, hydrophobic, polar, globular and helical domains or properties. Specific examples of binding domains include, but are not limited to, DNA binding domains and ATP binding domains.

[0279] As used herein, the term “Fc” refers to a human IgG Fc domain. Subtypes of IgG such as IgG1, IgG2, IgG3, and IgG4 are all being contemplated for usage as Fc domains. As used herein, the term “fragment,” as applied to a nucleic acid, refers to a subsequence of a larger nucleic acid. A “fragment” of a nucleic acid can be at least about 15 nucleotides in length; for example, at least about SO nucleotides to about 100 nucleotides; at least about 100 to about 500 nucleotides, at least about 500 to about 1000 nucleotides; at least about 1000 nucleotides to about 1500 nucleotides; about 1500 nucleotides to about 2500 nucleotides; or about 2500 nucleotides (and any integer value in between). As used herein, the term “fragment,” as applied to a protein or peptide, refers to a subsequence of a larger protein or peptide. A “fragment” of a protein or peptide can be at least about 20 amino acids in length; for example, at least about 50 amino acids in length; at least about 100 amino acids in length; at least about 200 amino acids in length; at least about 300 amino acids in length; or at least about 400 amino acids in length (and any integer value in between).

[0280] As used herein, the terms “hematopoietic cells” or “hematopoietic stem cells” refers to cell types found in the blood and/or lymph. These cell types include the myeloid cells (erythrocytes, thrombocytes, granulocytes (neutrophils, eosinophils, basophils) monocytes and macrophages, mast cells) and the lymphoid cells (B cells, various types of T cells, NK cells). These cells typically arise from hematopoietic stem cells in the bone marrow. It will be appreciated that certain hematopoietic cells, e.g., macrophages, may be present in tissues outside of the vascular or lymphatic systems. White blood cells (e.g., granulocytes (neutrophils, eosinophils, basophils, monocytes, macrophages, mast cells, and lymphoid cells) are a subset of hematopoietic cells.

[0281] As used herein, the term “host cell” refers to any cell type that is susceptible to transformation, transfection, transduction, or the like with a nucleic acid construct or expression vector comprising a polynucleotide of the present disclosure. In some embodiments, the term “host cell” encompasses any progeny of a parent cell that is not identical to the parent cell due to mutations that occur during replication. Host cells may include packaging cells, producer cells, and cells infected with viral vectors. In particular embodiments, host cells infected with viral vector of the present disclosure are administered to a subject in need of therapy. In some embodiments, host cells are transduced ex vivo. In other embodiments, host cells are transduced in vivo.

[0282] As used herein, the terms “hypophosphatasia” and “HPP” refer to a rare, heritable skeletal disorder caused by, e.g., one or more loss-of-function mutations in the ALPL (alkaline phosphatase, liver/bone/kidney) gene, which encodes tissue-nonspecific alkaline phosphatase (TNSALP). HPP can be further characterized as, e.g., infantile HPP or perinatal HPP (e.g., benign perinatal HPP or lethal perinatal HPP). For instance, “infantile HPP” describes a patient having HPP that is about three years of age or younger, whereas “perinatal HPP” describes a patient having HPP immediately before or after birth (e.g., one to four weeks after birth). The age of onset of HPP, such as when the subject exhibits symptoms of HPP, can also be categorized as, e.g., perinatal-onset HPP and infantile-onset HPP. Patients with HPP can exhibit symptoms of HPP including, but not limited to, skeletal deformity, hypotonia, mobility impairments, gait disturbance, bone deformity, joint pain, bone pain, bone fracture, muscle weakness, muscle pain, rickets (e.g., defects in growth plate cartilage), premature loss of deciduous teeth, incomplete bone mineralization, elevated blood and/or urine levels of phosphoethanolamine (PEA), PPi, pyridoxal 5′-phosphate (PLP), hypomineralization, rachitic ribs, hypercalciuria, short stature, HPP-related seizure, inadequate weight gain, craniosynostosis, and/or calcium pyrophosphate dihydrate crystal deposition (CPPD) in joints leading to, e.g., chondrocalcinosis and premature death. Symptoms of HPP can also include TBM and symptoms of TBM, such as cardio-respiratory arrest, tracheostomy, cardiac arrest, respiratory distress, sputum retention, wheezing, coughing, anoxic spells, cyanosis, bradycardia, tachyarrhythmia, spontaneous hyperextension of the neck, prolonged expiratory breathing phase, failure to thrive, sternal retractions, substernal retractions, intercostal retractions, intermittent or continuous dyspnea, and recurrent bronchitis or pneumonia.

[0283] As used therein, the term “lentiviral vector” refers to a non-replicating vector for the transduction of a host cell with a transgene comprising cis-acting lentiviral RNA or DNA sequences, and requiring lentiviral proteins (e.g., Gag, Pol, and/or Env) that are provided in trans. The lentiviral vector lacks expression of functional Gag, Pol, and Env proteins. The lentiviral vector may be present in the form of an RNA or DNA molecule, depending on the stage of production or development of said retroviral vectors.

[0284] As used herein, the term “nucleic acid” refers to polynucleotides such as DNA or RNA. Nucleic acids can be single-stranded, partly or completely, double-stranded, and in some cases partly or completely triple-stranded. Nucleic acids include genomic DNA, cDNA, mRNA, etc. Nucleic acids can be purified from natural sources, produced using recombinant expression systems and optionally purified, chemically synthesized, etc. Where appropriate, e.g., in the case of chemically synthesized molecules, nucleic acids can comprise nucleoside analogs such as analogs having chemically modified bases or sugars, backbone modifications, etc. The term “nucleic acid sequence” as used herein can refer to the nucleic acid material itself and is not restricted to the sequence information (i.e. the succession of letters chosen among the five base letters A, G, C, T, or U) that biochemically characterizes a specific nucleic acid, e.g. a DNA or RNA molecule. A nucleic acid sequence is presented in the 5′ to 3′ direction unless otherwise indicated. The term “nucleic acid segment” is used herein to refer to a nucleic acid sequence that is a portion of a longer nucleic acid sequence.

[0285] As used herein, the terms “operably linked” or “operably associated” refer to a functional relationship between two nucleic acids, wherein the expression, activity, localization, etc., of one of the sequences is controlled by, directed by, regulated by, modulated by, etc., the other nucleic acid. The two nucleic acids are said to be operably linked or operably associated or in operable association. “Operably linked” or “operably associated” can also refers to a relationship between two polypeptides wherein the expression of one of the polypeptides is controlled by, directed by, regulated by, modulated by, etc., the other polypeptide. For example, transcription of a nucleic acid is directed by an operably linked promoter; post-transcriptional processing of a nucleic acid is directed by an operably linked processing sequence; translation of a nucleic acid is directed by an operably linked translational regulatory sequence such as a translation initiation sequence; transport, stability, or localization of a nucleic acid or polypeptide is directed by an operably linked transport or localization sequence such as a secretion signal sequence; and post-translational processing of a polypeptide is directed by an operably linked processing sequence. Typically a first nucleic acid sequence that is operably linked to a second nucleic acid sequence, or a first polypeptide that is operatively linked to a second polypeptide, is covalently linked, either directly or indirectly, to such a sequence, although any effective three-dimensional association is acceptable. One of ordinary skill in the art will appreciate that multiple nucleic acids, or multiple polypeptides, may be operably linked or associated with one another.

[0286] As used herein, the terms a “packaging signal,” “packaging sequence,” or “psi sequence” refer to any nucleic acid sequence sufficient to direct packaging of a nucleic acid whose sequence comprises the packaging signal into a retroviral particle. The term includes naturally occurring packaging sequences and also engineered variants thereof. Packaging signals of a number of different retroviruses, including lentiviruses, are known in the art.

[0287] As used herein, the terms “pharmaceutically acceptable excipient,” “carrier,” or “diluent” refer to pharmaceutical components which do not alter the therapeutic properties of an active agent with which it is administered. One exemplary pharmaceutically acceptable carrier substance is physiological saline. For instance, the pharmaceutically acceptable carrier can include sodium chloride (e.g., 150 mM sodium chloride) and sodium phosphate (e.g., 25 mM sodium phosphate). Other physiologically acceptable excipients, carriers, and diluents, and their formulations, are known to those skilled in the art and described, e.g., in Remington: The Science and Practice of Pharmacy (22nd Ed), Allen (2012). For instance, a pharmaceutically acceptable excipient, carrier, or diluent can include dibasic sodium phosphate, heptahydrate; monobasic sodium phosphate, monohydrate; and sodium chloride at a pH between 7.2 and 7.6.

[0288] As used herein, the term “pharmaceutical composition” it is meant a composition containing an active agent as described herein, formulated with at least one pharmaceutically acceptable excipient, carrier, or diluent. The pharmaceutical composition can be manufactured or sold with the approval of a governmental regulatory agency as part of a therapeutic regimen for the treatment or prevention of a disease or event in a patient (e.g., an infant with HPP, such as an infant having perinatal-onset HPP, or an infant having infantile-onset HPP, or juvenile-onset HPP, or a patient having childhood-onset HPP). Pharmaceutical compositions can be formulated, for example, for subcutaneous administration, intravenous administration (e.g., as a sterile solution free of particulate emboli and in a solvent system suitable for intravenous use), for oral administration (e.g., a tablet, capsule, caplet, gelcap, or syrup), or any other formulation described herein, e.g., in unit dosage form.

[0289] As used herein, the terms “polynucleotide” or “nucleic acid” refer to messenger RNA (mRNA), RNA, genomic RNA (gRNA), plus strand RNA (RNA(+)), minus strand RNA (RNA(—)), genomic DNA (gDNA), complementary DNA (cDNA) or DNA. Polynucleotides include single and double stranded polynucleotides. In some embodiments, polynucleotides of the present disclosure include polynucleotides or variants having at least about 50%, 55%, 60%, 65%, 70%, 75%, 80%, 85%, 90%, 95%, 96%, 97%, 98%, 99% or 100% sequence identity to any of the reference sequences described herein (see, e.g., Sequence Listing), typically where the variant maintains at least one biological activity of the reference sequence. In various illustrative embodiments, the present disclosure contemplates, in part, viral vector and transfer plasmid polynucleotide sequences and compositions comprising the same. In particular embodiments, the present disclosure provides polynucleotides encoding therapeutic polypeptides.

[0290] As used herein, the term “polypeptide,” “polypeptide fragment,” “peptide” and “protein” are used interchangeably, unless specified to the contrary, and according to conventional meaning, i.e., as a sequence of amino acids. Polypeptides are not limited to a specific length, e.g., they may comprise a full-length protein sequence or a fragment of a full length protein, and may include post-translational modifications of the polypeptide, for example, glycosylations, acetylations, phosphorylations and the like, as well as other modifications known in the art, both naturally occurring and non-naturally occurring. In various embodiments, the polypeptides contemplated herein comprise a signal (or leader) sequence at the N-terminal end of the protein, which co-translationally or post-translationally directs transfer of the protein. Polypeptides can be prepared using any of a variety of well-known recombinant and/or synthetic techniques. In some embodiments, the polypeptides contemplated herein encompass alkaline phosphatases, or sequences that have deletions from, additions to, and/or substitutions of one or more amino acid of a CAR as disclosed herein.

[0291] Polypeptides include “polypeptide variants.” In some embodiments, polypeptide variants may differ from a naturally occurring polypeptide in one or more substitutions, deletions, additions and/or insertions. Such variants may be naturally occurring or may be synthetically generated, for example, by modifying one or more of the above polypeptide sequences. For example, in particular embodiments, it may be desirable to improve the binding affinity and/or other biological properties of the polypeptides disclosed herein, e.g. the alkaline phosphatase polypeptides, by introducing one or more substitutions, deletions, additions and/or insertions. In some embodiments, polypeptides of the present disclosure include polypeptides having at least about 65%, 70%, 75%, 85%, 90%, 95%, 98%, or 99% amino acid identity thereto.

[0292] As used herein, “prevent,” and similar words such as “prevented,” “preventing” etc., indicate an approach for preventing, inhibiting, or reducing the likelihood of the occurrence or recurrence of, a disease or condition. It also refers to delaying the onset or recurrence of a disease or condition or delaying the occurrence or recurrence of the symptoms of a disease or condition. As used herein, “prevention” and similar words also includes reducing the intensity, effect, symptoms and/or burden of a disease or condition prior to onset or recurrence of the disease or condition.

[0293] As used herein, the term “promoter,” as used herein, refers to a DNA sequence that determines the site of transcription initiation for an RNA polymerase. Promoter sequences comprise motifs which are recognized and bound by polypeptides, i.e. transcription factors. The said transcription factors shall upon binding recruit RNA polymerases II, preferably, RNA polymerase I, II or III, more preferably, RNA polymerase II or III, and most preferably, RNA polymerase II. Thereby will be initiated the expression of a nucleic acid operatively linked to the transcription control sequence. It is to be understood that dependent on the type of nucleic acid to be expressed, expression as meant herein may comprise transcription of DNA sequences into RNA polynucleotides (as suitable for, e.g., anti-sense approaches, RNAi approaches or ribozyme approaches) or may comprise transcription of DNA sequences into RNA polynucleotides followed by translation of the said RNA polynucleotides into polypeptides (as suitable for, e.g., gene expression and recombinant polypeptide production approaches). In order to govern expression of a nucleic acid sequence, the transcription control sequence may be located immediately adjacent to the nucleic acid to be expressed, i.e. physically linked to the said nucleic acid at its 5′ end. Alternatively, it may be located in physical proximity. In the latter case, however, the sequence must be located so as to allow functional interaction with the nucleic acid to be expressed.

[0294] As used herein, the terms “regulatory sequence” or “regulatory element” refer to a nucleic acid sequence that regulates one or more steps in the expression (particularly transcription, but in some cases other events such as splicing or other processing) of nucleic acid sequence(s) with which it is operatively linked. The term includes promoters, enhancers and other transcriptional control elements that direct or enhance transcription of an operatively linked nucleic acid. Regulatory sequences may direct constitutive expression (e.g. expression in most or all cell types under typical physiological conditions in culture or in an organism), cell type specific, lineage specific, or tissue specific expression, and/or regulatable (inducible or repressible) expression. For example, expression may be induced or repressed by the presence or addition of an inducing agent such as a hormone or other small molecule, by an increase in temperature, etc. Non-limiting examples of cell type, lineage, or tissue specific promoters appropriate for use in mammalian cells include lymphoid-specific promoters (see, for example, Calame et al., Adv. Immunol. 43:235, 1988) such as promoters of T cell receptors (see, e.g. Winoto et al., EMBO J. 8:729, 1989) and immunoglobulins (see, for example, Banerji et al., Cell 33:729, 1983; Queen et al., Cell 33:741, 1983), and neuron-specific promoters (e.g., the neurofilament promoter; Byrne et al., Proc. Natl. Acad. Sci. USA 86:5473, 1989). Developmentally-regulated promoters include hox promoters (see, e.g. Kessel et al., Science 249:374, 1990) and the α-fetoprotein promoter (Campes et al., Genes Dev. 3:537, 1989). Some regulatory elements may inhibit or decrease expression of an operatively linked nucleic acid. Such regulatory elements may be referred to as “negative regulatory elements.” A regulatory element whose activity can be induced or repressed by exposure to an inducing or repressing agent and/or by altering environmental conditions is referred to herein as a “regulatable” element.

[0295] As used herein, the terms “sALP” and “soluble alkaline phosphatase” refer to a soluble, non-membrane bound ALP or a domain or a biologically active fragment of the soluble, non-membrane bound ALP.

[0296] As used herein, the term “signal peptide” refers to a short peptide (about 5 to about 30 amino acids long) at the N-terminus of a polypeptide that directs a polypeptide towards the secretory pathway (e.g., the extracellular space). In some embodiments, the signal peptide is typically cleaved during secretion of the polypeptide. In some embodiments, the signal sequence may direct the polypeptide to an intracellular compartment or organelle. In some embodiments, a signal sequence may be identified by homology, or biological activity, to a peptide with the known function of targeting a polypeptide to a particular region of the cell.

[0297] As used herein, the term “subject” refers to any animal subject including laboratory animals (e.g., primates, rats, mice), livestock (e.g., cows, sheep, goats, pigs, turkeys, chickens), household pets (e.g., dogs, cats, rodents, etc.), and humans.

[0298] As used herein, the term “therapeutically effective amount” refers to a virus or transduced therapeutic cell may vary according to factors such as the disease state, age, sex, and weight of the individual, and the ability of the stem and progenitor cells to elicit a desired response in the individual. In some embodiments, a therapeutically effective amount is also one in which any toxic or detrimental effects of the virus or transduced therapeutic cells are outweighed by the therapeutically beneficial effects. In some embodiments, the term “therapeutically effective amount” includes an amount that is effective to “treat” a subject (e.g., a patient).

[0299] As used herein, the terms “treatment” or “treating” refer to any beneficial or desirable effect on the symptoms or pathology of a disease or pathological condition and may include even minimal reductions in one or more measurable markers of the disease or condition being treated. In some embodiments, the treatment can involve optionally either the reduction or amelioration of symptoms of the disease or condition, or the delaying of the progression of the disease or condition. “Treatment” does not necessarily indicate complete eradication or cure of the disease or condition, or associated symptoms thereof.

[0300] As used herein, the terms “variants” or “variant” refer to a nucleic acid or polypeptide differing from a reference nucleic acid or polypeptide but retaining essential properties thereof. Generally, variants are overall closely similar, and, in many regions, identical to the reference nucleic acid or polypeptide. Thus, “variant” forms of a transcription factor are overall closely similar, and capable of binding DNA and activate gene transcription.

[0301] As used herein, the term “vector” refers to a nucleic acid molecule capable transferring or transporting another nucleic acid molecule. In some embodiments, the transferred nucleic acid is generally linked to, e.g. inserted into, the vector nucleic acid molecule. In some embodiments, a vector may include sequences that direct autonomous replication in a cell or may include sequences sufficient to allow integration into host cell DNA. Useful vectors include, for example, plasmids (typically DNA plasmids, but RNA plasmids are also of use), cosmids, and viral vectors. As will be evident to one of skill in the art, the term “viral vector” is widely used refer either to a nucleic acid molecule (e.g., a plasmid) that includes virus-derived nucleic acid elements that typically facilitate transfer of the nucleic acid molecule or integration into the genome of a cell or to a viral particle that mediates nucleic acid transfer. In some embodiments, the viral particles will typically include various viral components and sometimes also host cell components in addition to nucleic acid(s). In particular, the terms “lentiviral vector,” “lentiviral expression vector,” etc. may be used to refer to lentiviral transfer plasmids and/or lentiviral particles of the present disclosure as described herein.

[0302] Polypeptides

[0303] In some embodiments, the present disclosure provides for a polypeptide having Formula (I):

[A]ᵥ-[B]-[C]_{w}-[R]_{q}-([D]ₓ-[E]_{y})_{z}, (I)
[0304] wherein
[0305] A comprises an amino acid sequence encoding a secretion signal peptide;
[0306] B comprises an amino acid encoding an alkaline phosphatase;
[0307] C comprises an amino acid sequence encoding a GPI anchor;
[0308] R is -(Mₒ(Fc)Nₚ)-, where M and N each independently include between 1 and 6 amino acids, where Fc is a Fc domain, and o and p are each independently 0, 1, or 2;
[0309] D comprises an amino acid sequence having between 4 and 6 amino acids, or is F(G)ₜF, where each F is the same amino acid, G is an amino acid sequence having 3, 4, or 5 amino acids, and t is an integer ranging from 2-5;
[0310] E comprises an amino acid sequence having between 1 and 8 amino acids;
[0311] q is 0 or 1;
[0312] v is 0 or 1;
[0313] w is 0 or 1;
[0314] x is 0 or an integer ranging from 1 to 6;
[0315] y is 0 or an integer ranging from 1 to 16; and
[0316] z is 0 or an integer ranging from 1 to 6.

[0317] In some embodiments, the polypeptide of Formula (I) is not conjugated to a dextran.

[0318] In some embodiments, the polypeptide of Formula (I) is catalytically competent to allow formation of hydroxyapatite crystals in bone.

[0319] In some embodiments, the amino acid encoding the alkaline phosphatase (“[B]”) is a tissue non-specific alkaline phosphatase. In some embodiments, the amino acid encoding the alkaline phosphatase has at least about 85% identity to SEQ ID NO: 11. In other embodiments, the amino acid encoding the alkaline phosphatase has at least about 90% identity to SEQ ID NO: 11. In other embodiments, the amino acid encoding the alkaline phosphatase has at least about 91% identity to SEQ ID NO: 11. In other embodiments, the amino acid encoding the alkaline phosphatase has at least about 92% identity to SEQ ID NO: 11. In other embodiments, the amino acid encoding the alkaline phosphatase has at least about 93% identity to SEQ ID NO: 11. In other embodiments, the amino acid encoding the alkaline phosphatase has at least about 94% identity to SEQ ID NO: 11.

[0320] In yet other embodiments, the amino acid encoding the alkaline phosphatase has at least about 95% identity to SEQ ID NO: 11. In further embodiments, the amino acid encoding the alkaline phosphatase has at least about 96% identity to SEQ ID NO: 11. In even further embodiments, the amino acid encoding the alkaline phosphatase has at least about 97% identity to SEQ ID NO: 11. In yet even further embodiments, the amino acid encoding the alkaline phosphatase has at least about 98% identity to SEQ ID NO: 11. In yet even further embodiments, the amino acid encoding the alkaline phosphatase has at least about 99% identity to SEQ ID NO: 11. In yet even further embodiments, the amino acid encoding the alkaline phosphatase has at least about 99% identity to SEQ ID NO: 11 and q is 0. In yet even further embodiments, the amino acid encoding the alkaline phosphatase has at least about 99% identity to SEQ ID NO: 11 and q is 1.

[0321] In some embodiments, the amino acid encoding the alkaline phosphatase comprises SEQ ID NO: 11. In some embodiments, the amino acid encoding the alkaline phosphatase comprises SEQ ID NO: 11 and q is 0. In some embodiments, the amino acid encoding the alkaline phosphatase comprises SEQ ID NO: 11 and q is 1.

[0322] In some embodiments, the amino acid encoding the alkaline phosphatase comprises a variant of SEQ ID NO: 11, such as a variant comprising one or more amino acid substitutions. In some embodiments, the amino acid encoding the alkaline phosphatase comprises a variant of SEQ ID NO: 11 having a single amino acid substitution. For instance, a variant of SEQ ID NO: 11 may comprises a C102S substitution. By way of another example, a variant of SEQ ID NO: 11 may comprise an E434G substitution. By way of yet another example, a variant of SEQ ID NO: 11 may comprise an A321H substitution. In some embodiments, the amino acid encoding the alkaline phosphatase comprises a variant of SEQ ID NO: 11 having two amino acid substitutions. For instance, a variant of SEQ ID NO: 11 may comprise any two of a C102S substitution, an E434G substitution, or an A321H substitution, e.g. both an A321H substitution and an E434G substitution. In some embodiments, the amino acid encoding the alkaline phosphatase comprises a variant of SEQ ID NO: 11 having three amino acid substitutions. In some embodiments, the amino acid encoding the alkaline phosphatase comprises a variant of SEQ ID NO: 11 having four amino acid substitutions. In some embodiments, the amino acid encoding the alkaline phosphatase comprises a variant of SEQ ID NO: 11 having five amino acid substitutions. In some embodiments, the amino acid encoding the alkaline phosphatase comprises a variant of SEQ ID NO: 11 having six amino acid substitutions.

[0323] In some embodiments, the amino acid encoding the secretion signal peptide has at least 90% sequence identity to SEQ ID NO: 12. In other embodiments, the amino acid encoding the secretion signal peptide has at least 95% sequence identity to SEQ ID NO: 12. In yet other embodiments, the amino acid encoding the secretion signal peptide has at least 96% sequence identity to SEQ ID NO: 12. In further embodiments, the amino acid encoding the secretion signal peptide has at least 97% sequence identity to SEQ ID NO: 12. In yet further embodiments, the amino acid encoding the secretion signal peptide has at least 98% sequence identity to SEQ ID NO: 12. In even further embodiments, the amino acid encoding the secretion signal peptide has at least 99% sequence identity to SEQ ID NO: 12. In yet even further embodiments, the amino acid encoding the secretion signal peptide comprises SEQ ID NO: 12.

[0324] In some embodiments, the amino acid encoding the secretion signal peptide has at least 90% sequence identity to any one of SEQ ID NOS: 33-43. In other embodiments, the amino acid encoding the secretion signal peptide has at least 95% sequence identity to any one of SEQ ID NOS: 33-43. In yet other embodiments, the amino acid encoding the secretion signal peptide has at least 96% sequence identity to any one of SEQ ID NOS: 33-43. In further embodiments, the amino acid encoding the secretion signal peptide has at least 97% sequence identity to any one of SEQ ID NOS: 33-43. In yet further embodiments, the amino acid encoding the secretion signal peptide has at least 98% sequence identity to any one of SEQ ID NOS: 33-43. In even further embodiments, the amino acid encoding the secretion signal peptide has at least 99% sequence identity to any one of SEQ ID NOS: 33-43. In yet even further embodiments, the amino acid encoding the secretion signal peptide comprises any one of SEQ ID NOS: 33-43.

[0325] In some embodiments, the amino acid encoding the GPI anchor has at least 90% sequence identity to SEQ ID NO: 13. In other embodiments, the amino acid encoding the GPI anchor has at least 95% sequence identity to SEQ ID NO: 13. In yet other embodiments, the amino acid encoding the GPI anchor has at least 96% sequence identity to SEQ ID NO: 13. In further embodiments, the amino acid encoding the GPI anchor has at least 97% sequence identity to SEQ ID NO: 13. In yet further embodiments, the amino acid encoding the GPI anchor has at least 98% sequence identity to SEQ ID NO: 13. In even further embodiments, the amino acid encoding the GPI anchor has at least 99% sequence identity to SEQ ID NO: 13. In yet even further embodiments, the amino acid encoding the GPI anchor comprises SEQ ID NO: 13.

[0326] In some embodiments, the amino acid encoding the GPI anchor has at least 90% sequence identity to SEQ ID NO: 14. In other embodiments, the amino acid encoding the GPI anchor has at least 95% sequence identity to SEQ ID NO: 14. In yet other embodiments, the amino acid encoding the GPI anchor has at least 96% sequence identity to SEQ ID NO: 14. In further embodiments, the amino acid encoding the GPI anchor has at least 97% sequence identity to SEQ ID NO: 14. In yet further embodiments, the amino acid encoding the GPI anchor has at least 98% sequence identity to SEQ ID NO: 14. In even further embodiments, the amino acid encoding the GPI anchor has at least 99% sequence identity to SEQ ID NO: 14. In yet even further embodiments, the amino acid encoding the GPI anchor comprises SEQ ID NO: 14.

[0327] In some embodiments, at least one of v or w is 0 and the amino acid encoding the alkaline phosphatase has at least about 90% identity to SEQ ID NO: 11. In other embodiments, at least one of v or w is 0 and the amino acid encoding the alkaline phosphatase has at least about 95% identity to SEQ ID NO: 11. In further embodiments, at least one of v or w is 0 and the amino acid encoding the alkaline phosphatase has at least about 96% identity to SEQ ID NO: 11. In even further embodiments, at least one of v or w is 0 and the amino acid encoding the alkaline phosphatase has at least about 97% identity to SEQ ID NO: 11. In yet even further embodiments, at least one of v or w is 0 and the amino acid encoding the alkaline phosphatase has at least about 98% identity to SEQ ID NO: 11. In yet even further embodiments, at least one of v or w is 0 and the amino acid encoding the alkaline phosphatase has at least about 99% identity to SEQ ID NO: 11. In other embodiments, at least one of v or w is 0 and the amino acid encoding the alkaline phosphatase comprises SEQ ID NO: 11.

[0328] In some embodiments, at least one of v or w is 0, the amino acid encoding the alkaline phosphatase has at least about 90% identity to SEQ ID NO: 11, and x+y=8 to 12. In some embodiments, at least one of v or w is 0, the amino acid encoding the alkaline phosphatase has at least about 95% identity to SEQ ID NO: 11, and x+y=8 to 12. In some embodiments, at least one of v or w is 0, the amino acid encoding the alkaline phosphatase has at least about 96% identity to SEQ ID NO: 11, and x+y=8 to 12. In some embodiments, at least one of v or w is 0, the amino acid encoding the alkaline phosphatase has at least about 97% identity to SEQ ID NO: 11, and x+y=8 to 12. In some embodiments, at least one of v or w is 0, the amino acid encoding the alkaline phosphatase has at least about 98% identity to SEQ ID NO: 11, and x+y=8 to 12. In some embodiments, at least one of v or w is 0, the amino acid encoding the alkaline phosphatase has at least about 99% identity to SEQ ID NO: 11, and x+y=8 to 12. In some embodiments, at least one of v or w is 0, the amino acid encoding the alkaline phosphatase comprises SEQ ID NO: 11, and x+y=8 to 12. In some embodiments, at least one of v or w is 0, the amino acid encoding the alkaline phosphatase comprises SEQ ID NO: 11, and x+y=8 to 12.

[0329] In some embodiments, at least one of v or w is 0, the amino acid encoding the alkaline phosphatase comprises SEQ ID NO: 11, and x+y=8 to 12, and q is 1. In some embodiments, at least one of v or w is 0, the amino acid encoding the alkaline phosphatase comprises SEQ ID NO: 11, and x+y=8 to 12, q is 1; and R is (-[LK]-Fc-[DI]-). In some embodiments, at least one of v or w is 0, the amino acid encoding the alkaline phosphatase comprises SEQ ID NO: 11, and x+y=8 to 12, q is 1; and R is (-[LK]-Fc-[DI]-), and [A] comprises an amino acid sequence having at least 95% identity to any one of SEQ ID NOS: 12 and 33-43. In some embodiments, at least one of v or w is 0, the amino acid encoding the alkaline phosphatase comprises SEQ ID NO: 11, and x+y=8 to 12, q is 1; and R is (-[LK]-Fc-[DI]-), and [A] comprises an amino acid sequence having at least 96% identity to any one of SEQ ID NOS: 12 and 33-43. In some embodiments, at least one of v or w is 0, the amino acid encoding the alkaline phosphatase comprises SEQ ID NO: 11, and x+y=8 to 12, q is 1; and R is (-[LK]-Fc-[DI]-), and [A] comprises an amino acid sequence having at least 97% identity to any one of SEQ ID NOS: 12 and 33-43. In some embodiments, at least one of v or w is 0, the amino acid encoding the alkaline phosphatase comprises SEQ ID NO: 11, and x+y=8 to 12, q is 1; and R is (-[LK]-Fc-[DI]-), and [A] comprises an amino acid sequence having at least 98% identity to any one of SEQ ID NOS: 12 and 33-43. In some embodiments, at least one of v or w is 0, the amino acid encoding the alkaline phosphatase comprises SEQ ID NO: 11, and x+y=8 to 12, q is 1; and R is (-[LK]-Fc-[DI]-), and [A] comprises an amino acid sequence having at least 99% identity to any one of SEQ ID NOS: 12 and 33-43. In some embodiments, at least one of v or w is 0, the amino acid encoding the alkaline phosphatase comprises SEQ ID NO: 11, and x+y=8 to 12, q is 1; and R is (-[LK]-Fc-[DI]-), and [A] comprises an amino acid sequence having any one of SEQ ID NOS: 12 and 33-43.

[0330] In some embodiments, v is 1 and w is 0, the amino acid encoding the alkaline phosphatase has at least about 90% identity to SEQ ID NO: 11, and x+y=8 to 12. In some embodiments, v is 1 and w is 0, the amino acid encoding the alkaline phosphatase has at least about 95% identity to SEQ ID NO: 11, and x+y=8 to 12. In some embodiments, v is 1 and w is 0, the amino acid encoding the alkaline phosphatase has at least about 96% identity to SEQ ID NO: 11, and x+y=8 to 12. In some embodiments, v is 1 and w is 0, the amino acid encoding the alkaline phosphatase has at least about 97% identity to SEQ ID NO: 11, and x+y=8 to 12. In some embodiments, v is 1 and w is 0, the amino acid encoding the alkaline phosphatase has at least about 98% identity to SEQ ID NO: 11, and x+y=8 to 12. In some embodiments, v is 1 and w is 0, the amino acid encoding the alkaline phosphatase has at least about 99% identity to SEQ ID NO: 11, and x+y=8 to 12. In some embodiments, v is 1 and w is 0, the amino acid encoding the alkaline phosphatase comprises SEQ ID NO: 11, and x+y=8 to 12. In some embodiments, v is 1 and w is 0, the amino acid encoding the alkaline phosphatase comprises SEQ ID NO: 11, and x+y=8 to 12 and q is 1.

[0331] In some embodiments, the amino acid encoding the alkaline phosphatase has at least about 95% identity to SEQ ID NO: 11, x+y=8 to 12, and where x and y are both at least 1. In some embodiments, the amino acid encoding the alkaline phosphatase has at least about 97% identity to SEQ ID NO: 11, x+y=8 to 12, and where x and y are both at least 1. In some embodiments, the amino acid encoding the alkaline phosphatase has at least about 99% identity to SEQ ID NO: 11, x+y=8 to 12, and where x and y are both at least 1. In some embodiments, the amino acid encoding the alkaline phosphatase has at least about 99% identity to SEQ ID NO: 11, x+y=8 to 12, where x and y are both at least 1; and q is 0. In some embodiments, the amino acid encoding the alkaline phosphatase has at least about 99% identity to SEQ ID NO: 11, x+y=8 to 12, where x and y are both at least 1; and q is 1. In some embodiments, the amino acid encoding the alkaline phosphatase has at least about 99% identity to SEQ ID NO: 11, and x+y=8 to 12, where x and y are both at least 1; q is 1; and R is (-[LK]-Fc-[DI]-).

[0332] In some embodiments, at least one of v or w is 0, the amino acid encoding the alkaline phosphatase has at least about 90% identity to SEQ ID NO: 11, and x+y=4 to 8. In some embodiments, at least one of v or w is 0, the amino acid encoding the alkaline phosphatase has at least about 95% identity to SEQ ID NO: 11, and x+y=4 to 8. In some embodiments, at least one of v or w is 0, the amino acid encoding the alkaline phosphatase has SEQ ID NO: 11, and x+y=4 to 8.

[0333] In some embodiments, v is 1, w is 0, the amino acid encoding the alkaline phosphatase has at least about 90% identity to SEQ ID NO: 11, and x+y=4 to 8. In some embodiments, v is 1, w is 0, the amino acid encoding the alkaline phosphatase has at least about 95% identity to SEQ ID NO: 11, and x+y=4 to 8. In some embodiments, v is 1, w is 0, the amino acid encoding the alkaline phosphatase has at least about 96% identity to SEQ ID NO: 11, and wherein x+y=4 to 8. In some embodiments, v is 1, w is 0, the amino acid encoding the alkaline phosphatase has at least about 97% identity to SEQ ID NO: 11, and x+y=4 to 8. In some embodiments, v is 1, w is 0, the amino acid encoding the alkaline phosphatase has at least about 98% identity to SEQ ID NO: 11, and x+y=4 to 8. In some embodiments, v is 1, w is 0, the amino acid encoding the alkaline phosphatase has at least about 99% identity to SEQ ID NO: 11, and x+y=4 to 8. In some embodiments, v is 1, w is 0, the amino acid encoding the alkaline phosphatase comprises SEQ ID NO: 11, and x+y=4 to 8.

[0334] In some embodiments, v is 1, w is 0, the amino acid encoding the alkaline phosphatase comprises SEQ ID NO: 11, x+y=4 to 8 and q is 0.

[0335] In some embodiments, v is 1, w is 0, the amino acid encoding the alkaline phosphatase comprises SEQ ID NO: 11, x+y=4 to 8 and q is 1. In some embodiments, v is 1, w is 0, the amino acid encoding the alkaline phosphatase comprises SEQ ID NO: 11, x+y=4 to 8, q is 1; and R is (-[LK]-Fc-[DI]-). In some embodiments, v is 1, w is 0, the amino acid encoding the alkaline phosphatase comprises SEQ ID NO: 11, x+y=5 to 7, q is 1; and R is (-[LK]-Fc-[DI]-). In some embodiments, v is 1, w is 0, the amino acid encoding the alkaline phosphatase comprises SEQ ID NO: 11, x+y=6, q is 1; and R is (-[LK]-Fc-[DI]-). In some embodiments, v is 1, w is 0, the amino acid encoding the alkaline phosphatase comprises SEQ ID NO: 11, x+y=6, q is 1; R is (-[LK]-Fc-[DI]-), and [A] comprises an amino acid sequence having at least 95% identity to any one of SEQ ID NOS: 12 and 33-43. In some embodiments, v is 1, w is 0, the amino acid encoding the alkaline phosphatase comprises SEQ ID NO: 11, x+y=6, q is 1; R is (-[LK]-Fc-[DI]-), and [A] comprises an amino acid sequence having at least 96% identity to any one of SEQ ID NOS: 12 and 33-43. In some embodiments, v is 1, w is 0, the amino acid encoding the alkaline phosphatase comprises SEQ ID NO: 11, x+y=6, q is 1; R is (-[LK]-Fc-[DI]-), [A] comprises an amino acid sequence having at least 97% identity to any one of SEQ ID NOS: 12 and 33-43. In some embodiments, v is 1, w is 0, the amino acid encoding the alkaline phosphatase comprises SEQ ID NO: 11, x+y=6 and q is 1; R is (-[LK]-Fc-[DI]-), and [A] comprises an amino acid sequence having at least 98% identity to any one of SEQ ID NOS: 12 and 33-43. In some embodiments, v is 1, w is 0, the amino acid encoding the alkaline phosphatase comprises SEQ ID NO: 11, x+y=6, q is 1; R is (-[LK]-Fc-[DI]-), and [A] comprises an amino acid sequence having at least 99% identity to any one of SEQ ID NOS: 12 and 33-43. In some embodiments, v is 1, w is 0, the amino acid encoding the alkaline phosphatase comprises SEQ ID NO: 11, x+y=6, q is 1; R is (-[LK]-Fc-[DI]-) and [A] comprises any one of SEQ ID NOS: 12 and 33-43.

[0336] In some embodiments, at least one of v or w is 0; q is 1; [E]_{y} is [DSS]₆; and the amino acid encoding the alkaline phosphatase comprises SEQ ID NO: 11. In some embodiments, at least one of v or w is 0; q is 1; [E]_{y} is [DSS]₆; the amino acid encoding the alkaline phosphatase comprises SEQ ID NO: 11; and [A] comprises at least 99% identity to any one of SEQ ID NOS: 12 and 33-43. In some embodiments, at least one of v or w is 0; q is 1; [E]_{y} is [DSS]₆; the amino acid encoding the alkaline phosphatase comprises SEQ ID NO: 11; and [A] comprises any one of SEQ ID NOS: 12 and 33-43.

[0337] In some embodiments, [A]ᵥ-[B]-[C]_{w} comprises an amino acid sequence having at least 85% sequence identity to SEQ ID NO: 10. In some embodiments, [A]ᵥ-[B]-[C]_{w} comprises an amino acid sequence having at least 90% sequence identity to SEQ ID NO: 10. In some embodiments, [A]ᵥ-[B]-[C]_{w} comprises an amino acid sequence having at least 95% sequence identity to SEQ ID NO: 10. In some embodiments, [A]ᵥ-[B]-[C]_{w} comprises an amino acid sequence having at least 96% sequence identity to SEQ ID NO: 10. In some embodiments, [A]ᵥ-[B]-[C]_{w} comprises an amino acid sequence having at least 97% sequence identity to SEQ ID NO: 10. In some embodiments, [A]ᵥ-[B]-[C]_{w} comprises an amino acid sequence having at least 98% sequence identity to SEQ ID NO: 10. In some embodiments, [A]ᵥ-[B]-[C]_{w} comprises an amino acid sequence having at least 99% sequence identity to SEQ ID NO: 10. In some embodiments, [A]ᵥ-[B]-[C]_{w} comprises an amino acid sequence comprising SEQ ID NO: 10.

[0338] In some embodiments, [A]ᵥ-[B]-[C]_{w} comprises an amino acid sequence having at least 85% sequence identity to any one of SEQ ID NOS: 27-32. In some embodiments, [A]ᵥ-[B]-[C]_{w} comprises an amino acid sequence having at least 90% sequence identity to any one of SEQ ID NOS: 27-32. In some embodiments, [A]ᵥ-[B]-[C]_{w} comprises an amino acid sequence having at least 95% sequence identity to any one of SEQ ID NOS: 27-32. In some embodiments, [A]ᵥ-[B]-[C]_{w} comprises an amino acid sequence having at least 96% sequence identity to any one of SEQ ID NOS: 27-32. In some embodiments, [A]ᵥ-[B]-[C]_{w} comprises an amino acid sequence having at least 97% sequence identity to any one of SEQ ID NOS: 27-32. In some embodiments, [A]ᵥ-[B]-[C]_{w} comprises an amino acid sequence having at least 98% sequence identity to any one of SEQ ID NOS: 27-32. In some embodiments, [A]ᵥ-[B]-[C]_{w} comprises an amino acid sequence having at least 99% sequence identity to any one of SEQ ID NOS: 27-32. In some embodiments, [A]ᵥ-[B]-[C]_{w} comprises an amino acid sequence comprising any one of SEQ ID NOS: 27-32.

[0339] In some embodiments, the Fc domain has at least 90% sequence identity to that of SEQ ID NO: 130. In some embodiments, the Fc domain has at least 91% sequence identity to that of SEQ ID NO: 130. In some embodiments, the Fc domain has at least 92% sequence identity to that of SEQ ID NO: 130. In some embodiments, the Fc domain has at least 93% sequence identity to that of SEQ ID NO: 130. In some embodiments, the Fc domain has at least 94% sequence identity to that of SEQ ID NO: 130. In some embodiments, the Fc domain has at least 95% sequence identity to that of SEQ ID NO: 130. In some embodiments, the Fc domain has at least 96% sequence identity to that of SEQ ID NO: 130. In some embodiments, the Fc domain has at least 97% sequence identity to that of SEQ ID NO: 130. In some embodiments, the Fc domain has at least 98% sequence identity to that of SEQ ID NO: 130. In some embodiments, the Fc domain has at least 99% sequence identity to that of SEQ ID NO: 130. In some embodiments, the Fc domain comprises SEQ ID NO: 130. In some embodiments, the Fc domain comprises SEQ ID NO: 130 and y ranges from 4 to 6. In some embodiments, the Fc domain comprises SEQ ID NO: 130 and [E]_{y} is [DSS]₆. In some embodiments, the R comprises SEQ ID NO: 9 and [E]_{y} is [DSS]₆.

[0340] In some embodiments, M comprises one or more amino acids selected from glycine, serine, threonine, alanine, lysine, and glutamic acid. In some embodiments, M comprises 2 amino acids. For example, M may comprise leucine and lysine. In some embodiments, M is leucine-lysine. By way of another example, M may comprise two alanine amino acids. In other embodiments, M comprises three amino acids.

[0341] In some embodiments, N comprises one or more amino acids selected from glycine, serine, threonine, alanine, lysine, and glutamic acid. In some embodiments, N comprises 2 amino acids (i.e., a diamino acid). For example, N may comprise aspartic acid and isoleucine. By way of another example, N may comprise two alanine amino acids. In some embodiments, N is aspartic acid—isoleucine. In other embodiments, N comprises 3 amino acids.

[0342] In some embodiments, M is leucine-lysine and N is aspartic acid—isoleucine. In some embodiments, M is leucine-lysine and N is aspartic acid—isoleucine and Fc has at least 90% sequence identity to that of SEQ ID NO: 130. In some embodiments, M is leucine-lysine and N is aspartic acid—isoleucine and Fc has at least 91% sequence identity to that of SEQ ID NO: 130. In some embodiments, M is leucine-lysine and N is aspartic acid—isoleucine and Fc has at least 92% sequence identity to that of SEQ ID NO: 130. In some embodiments, M is leucine-lysine and N is aspartic acid—isoleucine and Fc has at least 93% sequence identity to that of SEQ ID NO: 130. In some embodiments, M is leucine-lysine and N is aspartic acid—isoleucine and Fc has at least 94% sequence identity to that of SEQ ID NO: 130. In some embodiments, M is leucine-lysine and N is aspartic acid—isoleucine and Fc has at least 95% sequence identity to that of SEQ ID NO: 130. In some embodiments, M is leucine-lysine and N is aspartic acid—isoleucine and Fc has at least 96% sequence identity to that of SEQ ID NO: 130. In some embodiments, M is leucine-lysine and N is aspartic acid—isoleucine and Fc has at least 97% sequence identity to that of SEQ ID NO: 130. In some embodiments, M is leucine-lysine and N is aspartic acid—isoleucine and Fc has at least 98% sequence identity to that of SEQ ID NO: 130. In some embodiments, M is leucine-lysine and N is aspartic acid—isoleucine and Fc has at least 99% sequence identity to that of SEQ ID NO: 130. In some embodiments, M is leucine-lysine and N is aspartic acid—isoleucine and Fc comprises SEQ ID NO: 130.

[0343] In some embodiments, M is leucine-lysine and N is aspartic acid—isoleucine; and o, p, and q are each 1. In some embodiments, M is leucine-lysine and N is aspartic acid—isoleucine and Fc has at least 90% sequence identity to that of SEQ ID NO: 130; and o, p, and q are each 1. In some embodiments, M is leucine-lysine and N is aspartic acid—isoleucine and Fc has at least 91% sequence identity to that of SEQ ID NO: 130; and o, p, and q are each 1. In some embodiments, M is leucine-lysine and N is aspartic acid—isoleucine and Fc has at least 92% sequence identity to that of SEQ ID NO: 130; and o, p, and q are each 1. In some embodiments, M is leucine-lysine and N is aspartic acid—isoleucine and Fc has at least 93% sequence identity to that of SEQ ID NO: 130; and o, p, and q are each 1. In some embodiments, M is leucine-lysine and N is aspartic acid—isoleucine and Fc has at least 94% sequence identity to that of SEQ ID NO: 130; and o, p, and q are each 1. In some embodiments, M is leucine-lysine and N is aspartic acid—isoleucine and Fc has at least 95% sequence identity to that of SEQ ID NO: 130; and o, p, and q are each 1. In some embodiments, M is leucine-lysine and N is aspartic acid—isoleucine and Fc has at least 96% sequence identity to that of SEQ ID NO: 130; and o, p, and q are each 1. In some embodiments, M is leucine-lysine and N is aspartic acid—isoleucine and Fc has at least 97% sequence identity to that of SEQ ID NO: 130; and o, p, and q are each 1. In some embodiments, M is leucine-lysine and N is aspartic acid—isoleucine and Fc has at least 98% sequence identity to that of SEQ ID NO: 130; and o, p, and q are each 1. In some embodiments, M is leucine-lysine and N is aspartic acid—isoleucine and Fc has at least 99% sequence identity to that of SEQ ID NO: 130; and o, p, and q are each 1. In some embodiments, M is leucine-lysine; N is aspartic acid—isoleucine and Fc comprises SEQ ID NO: 130; and o, p, and q are each 1. In some embodiments, M is leucine-lysine; N is aspartic acid—isoleucine; Fc comprises SEQ ID NO: 130; o, p, and q are each 1; and [A] has at least 99% identity to any one of SEQ ID NOS: 12 and 33-43. In some embodiments, M is leucine-lysine; N is aspartic acid—isoleucine; Fc comprises SEQ ID NO: 130; o, p, and q are each 1; and [A] comprises any one of SEQ ID NOS: 12 and 33-43.

[0344] In some embodiments, M is leucine-lysine and N is aspartic acid—isoleucine; o, p, q, and z are each 1; and x is 0. In some embodiments, M is leucine-lysine and N is aspartic acid—isoleucine and Fc has at least 90% sequence identity to that of SEQ ID NO: 130; o, p, q, and z are each 1; and x is 0. In some embodiments, M is leucine-lysine and N is aspartic acid—isoleucine and Fc has at least 91% sequence identity to that of SEQ ID NO: 130; o, p, q, and z are each 1; and x is 0. In some embodiments, M is leucine-lysine and N is aspartic acid—isoleucine and Fc has at least 92% sequence identity to that of SEQ ID NO: 130; o, p, q, and z are each 1; and x is 0. In some embodiments, M is leucine-lysine and N is aspartic acid—isoleucine and Fc has at least 93% sequence identity to that of SEQ ID NO: 130; o, p, q, and z are each 1; and x is 0. In some embodiments, M is leucine-lysine and N is aspartic acid—isoleucine and Fc has at least 94% sequence identity to that of SEQ ID NO: 130; o, p, q, and z are each 1; and x is 0. In some embodiments, M is leucine-lysine and N is aspartic acid—isoleucine and Fc has at least 95% sequence identity to that of SEQ ID NO: 130; o, p, q, and z are each 1; and x is 0. In some embodiments, M is leucine-lysine and N is aspartic acid—isoleucine and Fc has at least 96% sequence identity to that of SEQ ID NO: 130; o, p, q, and z are each 1; and x is 0. In some embodiments, M is leucine-lysine and N is aspartic acid—isoleucine and Fc has at least 97% sequence identity to that of SEQ ID NO: 130; o, p, q, and z are each 1; and x is 0. In some embodiments, M is leucine-lysine and N is aspartic acid—isoleucine and Fc has at least 98% sequence identity to that of SEQ ID NO: 130; o, p, q, and z are each 1; and x is 0. In some embodiments, M is leucine-lysine and N is aspartic acid—isoleucine and Fc has at least 99% sequence identity to that of SEQ ID NO: 130; o, p, q, and z are each 1; and x is 0. In some embodiments, M is leucine-lysine and N is aspartic acid—isoleucine and Fc comprises SEQ ID NO: 130; o, p, q, and z are each 1; and x is 0. In some embodiments, M is leucine-lysine and N is aspartic acid—isoleucine and Fc comprises SEQ ID NO: 130; o, p, q, and z are each 1; x is 0; and [A] has at least 99% identity to any one of SEQ ID NOS: 12 and 33-43. In some embodiments, M is leucine-lysine and N is aspartic acid—isoleucine and Fc comprises SEQ ID NO: 130; o, p, q, and z are each 1; x is 0; and [A] comprises any one of SEQ ID NOS: 12 and 33-43.

[0345] In some embodiments, [R] comprises at least 90% identity to SEQ ID NO: 9. In some embodiments, [R] comprises at least 95% identity to SEQ ID NO: 9. In some embodiments, [R] comprises at least 96% identity to SEQ ID NO: 9. In some embodiments, [R] comprises at least 97% identity to SEQ ID NO: 9. In some embodiments, [R] comprises at least 98% identity to SEQ ID NO: 9. In some embodiments, [R] comprises at least 99% identity to SEQ ID NO: 9. In some embodiments, [R] comprises SEQ ID NO: 9.

[0346] In some embodiments, D is an amino acid sequence comprising four amino acids. In some embodiments, each of the four amino acids is the same. In other embodiments, three of the four amino acids are the same. In yet other embodiments, two of the four amino acids are the same. In some embodiments, at least two contiguous amino acids of the four amino acids are the same. In other embodiments, at least three contiguous amino acids of the four amino acids are the same. In some embodiments, the four amino acids are selected from glycine, serine, threonine, alanine, lysine, and glutamic acid. In some embodiments, D comprises 4 amino acids, and x ranges from 1 to 6. In some embodiments, D comprises 4 amino acids, and x ranges from 1 to 4. In some embodiments, D comprises 4 amino acids, and x is 1 or 2. In some embodiments, D comprises 4 amino acids, and x is 2. In some embodiments, D comprises 4 amino acids and x is 1. In some embodiments, D comprises 4 amino acids, and x is 1 or 2, and q is 0. In some embodiments, D comprises 4 amino acids, and x is 2 and q is 0. In some embodiments, D comprises 4 amino acids and x is 1 and q is 0. In some embodiments, D comprises 4 amino acids and x is 1 and q is 1.

[0347] In some embodiments, D is GGGS. In other embodiments, D is GGSS. In yet other embodiments, D is GSSS. In further embodiments, D is GSGS. In some embodiments, D is GGGS and x is an integer ranging from 1 to 4. In some embodiments, D is GGGS and x is an integer ranging from 1 to 3. In some embodiments, D is GGGS and x is 1 or 2. In some embodiments, D is GGGS, x is an integer ranging from 1 to 4, and y is an integer ranging from 1 to 8. In some embodiments, D is GGGS, x is an integer ranging from 1 to 3, and y is an integer ranging from 1 to 8. In some embodiments, D is GGGS, x is 1 or 2, and y is an integer ranging from 1 to 8. In some embodiments, D is GGGS, x is 1 or 2, and y is an integer ranging from 1 to 8 and q is 0. In some embodiments, D is GGGS, x is 1 or 2, y is an integer ranging from 1 to 8 and q is 1. In some embodiments, D is GGGS, x is 1 or 2, y is an integer ranging from 1 to 8, q is 1, and R is (-[LK]-Fc-[DI]-). In some embodiments, D is GGGS, x is 2, y is an integer ranging from 1 to 8, q is 1, and R is (-[LK]-Fc-[DI]-). In some embodiments, D is GGGS, z is 1, x is 2, y is an integer ranging from 1 to 8, q is 1, and R is (-[LK]-Fc-[DI]-).

[0348] In some embodiments, D is an amino acid sequence comprising five amino acids. In some embodiments, each of the five amino acids is the same. In some embodiments, four of the five amino acids are the same. In other embodiments, three of the five amino acids are the same. In other embodiments, two of the five amino acids are the same. In some embodiments, at least two contiguous amino acids of the five amino acids are the same. In other embodiments, at least three contiguous amino acids of the five amino acids are the same. In yet other embodiments, four contiguous amino acids of the five amino acids are the same. In some embodiments, the five amino acids are selected from glycine, serine, threonine, alanine, lysine, and glutamic acid. In some embodiments, D comprises 5 amino acids, and x ranges from 1 to 6. In some embodiments, D comprises 5 amino acids, and x ranges from 1 to 4. In some embodiments, D comprises 5 amino acids, and x is 1 or 2. In some embodiments, D comprises 5 amino acids and x is 1. In some embodiments, D comprises 5 amino acids and x is 1 and q is 0. In some embodiments, D comprises 5 amino acids, x is 1, and q is 1. In some embodiments, D comprises 5 amino acids, x is 1, and q is 1 and R is (-[LK]-Fc-[DI]-).

[0349] In some embodiments, D is GGGGS. In other embodiments, D is GGGSS. In yet other embodiments, D is GGSSS. In further embodiments, D is GGSGS. In even further embodiments, D is GGSGS. In some embodiments, D is GGGGS or GGGSS, and wherein x is an integer ranging from 1 to 4. In some embodiments, D is GGGGS or GGGSS, and wherein x is an integer ranging from 1 to 3. In some embodiments, D is GGGGS or GGGSS, and wherein x is 1 or 2. In some embodiments, D is GGGGS or GGGSS, and wherein x is an integer ranging from 1 to 4, and wherein y is an integer ranging from between 1 and 8. In some embodiments, D is GGGGS or GGGSS, and wherein x is an integer ranging from 1 to 3 and wherein y is an integer ranging from between 1 and 8. In some embodiments, D is GGGGS or GGGSS, and wherein x is 1 or 2, and wherein y is an integer ranging from between 1 and 8.

[0350] In some embodiments, D is GGGGS or GGGSS, and wherein x is an integer ranging from 1 to 3, E is -D-S-S-, and wherein y is an integer ranging from between 1 and 8. In some embodiments, D is GGGGS or GGGSS, and wherein x is 1 or 2, E is -D-S-S-, and wherein y is an integer ranging from between 1 and 8. In some embodiments, D is GGGGS or GGGSS, and wherein x is an integer ranging from 1 to 3, E is aspartic acid, and wherein y is an integer ranging from between 8 and 12. In some embodiments, D is GGGGS or GGGSS, and wherein x is 1 or 2, E is aspartic acid, and wherein y is 10. In some embodiments, D is GGGGS, and wherein x is 1 or 2, E is aspartic acid, and wherein y ranges from 4 to 16. In some embodiments, D is GGGGS, and wherein x is 1 or 2, E is aspartic acid, and wherein y ranges from 8 to 12. In some embodiments, D is GGGGS, and wherein x is 1 or 2, E is aspartic acid, and wherein y is 10. In some embodiments, D is GGGGS, and wherein x is 1 or 2, E is aspartic acid, and wherein y is 10 and q is 0. In some embodiments, D is GGGGS, and wherein x is 1 or 2, E is aspartic acid, and wherein y is 10 and q is 1. In some embodiments, D is GGGGS, and wherein x is 1 or 2, E is aspartic acid, and wherein y is 10 and q is 1 and R is (-[LK]-Fc-[DI]-).

[0351] In some embodiments, D is EAAAK. In some embodiments, D is EAAAK, and wherein x is an integer ranging from 2 to 5. In other embodiments, D is EAAAK, wherein x is an integer ranging from 1 to 4. In yet other embodiments, D is EAAAK, wherein x is an integer ranging from 1 to 3. In further embodiments, D is EAAAK, wherein x is 1 or 2.

[0352] In some embodiments, D is F(G)ₜF, where each F is the same amino acid, G is an amino acid sequence having 3, 4, or 5 amino acids, and t is an integer ranging from 2-5. In some embodiments, each F is alanine. In some embodiments, G is EAAAK. In some embodiments, each F is alanine, G is EAAAK, and t is 2 or 3. In some embodiments, each F is alanine, G is EAAAK, t is 2 or 2, and x is 1 or 2. In some embodiments, D is an amino acid sequence comprising six amino acids. In some embodiments, each of the six amino acids is the same. In some embodiments, five of the six amino acids are the same. In some embodiments, four of the six amino acids are the same. In other embodiments, three of the six amino acids are the same. In yet other embodiments, two of the six amino acids are the same. In some embodiments, at least two contiguous amino acids of the six amino acids are the same. In other embodiments, at least three contiguous amino acids of the six amino acids are the same. In yet other embodiments, four contiguous amino acids of the six amino acids are the same. In yet further embodiments, five contiguous amino acids of the six amino acids are the same. In some embodiments, the six amino acids are selected from glycine, serine, threonine, alanine, lysine, and glutamic acid. In some embodiments, D comprises 6 amino acids, and x ranges from 1 to 6. In some embodiments, D comprises 6 amino acids, and x ranges from 1 to 4. In some embodiments, D comprises 6 amino acids, and x is 1 or 2. In some embodiments, D comprises 6 amino acids and x is 1. In some embodiments, D comprises 6 amino acids, and x is 1 or 2 and q is 0. In some embodiments, D comprises 6 amino acids and x is 1 and q is 0. In some embodiments, D comprises 6 amino acids and x is 1 and q is 1. In some embodiments, D comprises 6 amino acids and x is 1 and q is 1 and R is (-[LK]-Fc-[DI]-).

[0353] In some embodiments, E comprises 1 amino acid. In some embodiments, the 1 amino acid is selected from aspartic acid, serine, lysine, threonine, tyrosine, alanine, methionine, valine, tryptophan, proline, arginine, glutamine. In other embodiments, the 1 amino acid is selected from aspartic acid and serine. In some embodiments, E comprises 1 amino acid, and y ranges from 1 to 16. In some embodiments, E comprises 1 amino acid, and y ranges from 4 to 16. In some embodiments, E comprises 1 amino acid, and y ranges from 2 to 12. In some embodiments, E comprises 1 amino acid, and y ranges from 2 to 10. In some embodiments, E comprises 1 amino acid, and y ranges from 4 to 12. In some embodiments, E comprises 1 amino acid, and y is 10.

[0354] In some embodiments, E is aspartic acid, and y ranges from 1 to 16. In some embodiments, E is aspartic acid, and y ranges from 4 to 12. In some embodiments, E is aspartic acid and y is 10. In some embodiments, E is aspartic acid, v+w is 1, and y ranges from 1 to 16. In some embodiments, E is aspartic acid, v+w is 1, and y ranges from 4 to 12. In some embodiments, E is aspartic acid, v+w is 1, and y is 10. In some embodiments, E is aspartic acid, v+w is 1, x is 0, and y ranges from 1 to 16. In some embodiments, E is aspartic acid, v+w is 1,
[0355] x is 0, and y ranges from 4 to 12. In some embodiments, E is aspartic acid, v+w is 1, x is 0, and y is 10. In some embodiments, E is aspartic acid, v+w is 1, x is 0, and y is 10 and q is 1.

[0356] In some embodiments, E comprises 2 amino acids. In some embodiments, the 2 amino acids are selected from aspartic acid, serine, lysine, threonine, tyrosine, alanine, methionine, valine, tryptophan, proline, arginine, glutamine. In other embodiments, the 2 amino acid is selected from aspartic acid and serine. In some embodiments, E is -D-S-. In other embodiments, E is -D-D-. In some embodiments, E comprises 2 amino acids, and y ranges from 1 to 16. In some embodiments, E comprises 2 amino acids, and y ranges from 1 to 12. In some embodiments, E comprises 2 amino acids, and y ranges from 1 to 10. In some embodiments, E comprises 2 amino acids, and y ranges from 1 to 8. In some embodiments, E comprises 2 amino acids, and y ranges from 1 to 6. In some embodiments, E comprises 2 amino acids, and y ranges from 1 to 4. In some embodiments, E comprises 2 amino acids, and y is 1 or 2. In some embodiments, E comprises 2 amino acids, and y ranges from 2 to 12. In some embodiments, E comprises 2 amino acids, and y ranges from 2 to 10. In some embodiments, E comprises 2 amino acids, and y ranges from 2 to 8. In some embodiments, E comprises 2 amino acids, and y ranges from 2 to 8 and q is 0.

[0357] In some embodiments, E is -D-D- or -D-S-, and y ranges from 1 to 16. In some embodiments, E is -D-D- or -D-S-, and y ranges from 1 to 12. In some embodiments, E is -D-D- or -D-S-, and y ranges from 1 to 10. In some embodiments, E is aspartic acid, and y ranges from 1 to 8. In some embodiments, E is -D-D- or -D-S-, and y is 10. In some embodiments, E is -D-D- or -D-S-, v+w is 1, and y ranges from 1 to 16. In some embodiments, E is -D-D- or -D-S-, y ranges from 1 to 12. In some embodiments, E is -D-D- or -D-S-, v+w is 1, and y ranges from 1 to 10. In some embodiments, E is -D-D- or -D-S-, v+w is 1, and y ranges from 1 to 8. In some embodiments, E is -D-D- or -D-S-, v+w is 1, x is 0, and y ranges from 1 to 16. In some embodiments, E is -D-D- or -D-S-, v+w is 1, x is 0, and y ranges from 1 to 12. In some embodiments, E is -D-D- or -D-S-, v+w is 1, x is 0, and y ranges from 1 to 10. In some embodiments, E is -D-D- or -D-S-, v+w is 1, x is 0, and y ranges from 1 to 8. In some embodiments, E is -D-D- or -D-S-, v+w is 1, x is 0, y ranges from 1 to 8, and z is 1.

[0358] In some embodiments, E comprises 3 amino acids. In some embodiments, the 3 amino acids are selected from aspartic acid, serine, lysine, threonine, tyrosine, alanine, methionine, valine, tryptophan, proline, arginine, glutamine. In other embodiments, the 3 amino acid is selected from aspartic acid and serine. In some embodiments, E is -D-S-S-. In other embodiments, E is -D-D-S-. In other embodiments, E is -D-D-D. In other embodiments, E is -D-S-S-.

[0359] In some embodiments, E comprises 3 amino acids, and y ranges from 1 to 16. In some embodiments, E comprises 3 amino acids, and y ranges from 1 to 12. In some embodiments, E comprises 3 amino acids, and y ranges from 2 to 12. In some embodiments, E comprises 3 amino acids, and y ranges from 1 to 10. In some embodiments, E comprises 3 amino acids, and y ranges from 2 to 10. In some embodiments, E comprises 3 amino acids, and y ranges from 1 to 8. In some embodiments, E comprises 3 amino acids, and y ranges from 2 to 8. In some embodiments, E comprises 3 amino acids, and y ranges from 1 to 6. In some embodiments, E comprises 3 amino acids, and y ranges from 3 to 6. In some embodiments, E comprises 3 amino acids, and y ranges from 3 to 6 and q is 0.

[0360] In some embodiments, E is -D-S-S-, and y ranges from 1 to 16. In some embodiments, E is -D-S-S-, and y ranges from 1 to 12. In some embodiments, E is -D-S-S-, and y ranges from 1 to 10. In some embodiments, E is aspartic acid, and y ranges from 1 to 8. In some embodiments, E is -D-S-S-, and y is 6, i.e. [E]_{y} is [-DSS-]₆. In other embodiments, E is -D-S-S-, y is 6 and z is 1. In some embodiments, E is -D-S-S-, y is 6 and q is 0. In other embodiments, E is -D-S-S-, y is 6, z is 1, and q is 0. In other embodiments, E is -D-S-S-, y is 6, z is 1, q is 0, and x is 0. In other embodiments, E is -D-S-S-, y is 6, z is 1, q is 0, and x is 2.

[0361] In some embodiments, E is -D-S-S-, y is 6 and q is 1. In other embodiments, E is -D-S-S-, y is 6, z is 1, and q is 1. In other embodiments, E is -D-S-S-, y is 6, z is 1, x is 0, and q is 1. In other embodiments, E is -D-S-S-, y is 6, z is 1, x is 2, and q is 1.

[0362] In some embodiments, E is -D-S-S-, y is 6, q is 1, and R is (-[LK]-Fc-[DI]-). In some embodiments, E is -D-S-S-, y is 6, q is 1, R is (-[LK]-Fc-[DI]-), and [A] has at least 99% identity to any one of SEQ ID NOS: 12 and 33-43. In some embodiments, E is -D-S-S-, y is 6, q is 1, R is (-[LK]-Fc-[DI]-), and [A] has identity to any one of SEQ ID NOS: 12 and 33-43. In some embodiments, E is -D-S-S-, y is 6, q is 1, R is (-[LK]-Fc-[DI]-), [A] has at least 99% identity to any one of SEQ ID NOS: 12 and 33-43; and [B] comprises at least 99% identity to that of SEQ ID NO: 11. In some embodiments, E is -D-S-S-, y is 6, q is 1, R is (-[LK]-Fc-[DI]-), [A] has at least 99% identity to any one of SEQ ID NOS: 12 and 33-43; and [B] comprises SEQ ID NO: 11.

[0363] In some embodiments, E comprises 4 amino acids. In some embodiments, the 4 amino acids are selected from aspartic acid, serine, lysine, threonine, tyrosine, alanine, methionine, valine, tryptophan, proline, arginine, glutamine. In other embodiments, the 4 amino acid is selected from aspartic acid and serine. In some embodiments, E is DDSS. In other embodiments, E is -D-D-D-S-. In other embodiments, E is -D-D-D-D-. In other embodiments, E is -D-D-S-S-. In other embodiments, E is -D-S-S-S-. In some embodiments, E comprises 4 amino acids, and y ranges from 1 to 16. In some embodiments, E comprises 4 amino acids, and y ranges from 1 to 12. In some embodiments, E comprises 4 amino acids, and y ranges from 1 to 10. In some embodiments, E comprises 4 amino acids, and y ranges from 1 to 8. In some embodiments, E comprises 4 amino acids, and y ranges from 1 to 6. In some embodiments, E comprises 4 amino acids, and y ranges from 1 to 4. In some embodiments, E comprises 4 amino acids, and y is 1 or 2. In some embodiments, E comprises 4 amino acids, and y ranges from 2 to 12. In some embodiments, E comprises 4 amino acids, and y ranges from 2 to 10. In some embodiments, E comprises 4 amino acids, and y ranges from 2 to 8. In some embodiments, E comprises 4 amino acids, and y ranges from 2 to 8 and q is 0. In some embodiments, E comprises 4 amino acids, and y ranges from 2 to 8. In some embodiments, E comprises 4 amino acids, and y ranges from 2 to 8 and q is 1.

[0364] In some embodiments, E comprises 5 or more amino acids. In some embodiments, the 5 or more amino acids are selected from aspartic acid, serine, lysine, threonine, tyrosine, alanine, methionine, valine, tryptophan, proline, arginine, glutamine. In other embodiments, the 5 or more amino acid is selected from aspartic acid and serine. In other embodiments, E comprises 5 amino acids. For example, E may be -D-D-S-S-D- or -D-D-S-S-D-. In other embodiments, E comprises 6 amino acids. For example, E may be -D-D-S-S-D-D-. In other embodiments, E comprises 7 amino acids. For example, E may be -S-D-D-S-S-D-D-. By way of another example, E may be KRRTPVR. By way of yet another example, E may be KNFQSRS. By way of a further example, E may be KTYASMQ. In other embodiments, E comprises 8 amino acids. For example, E may be -S-D-D-S-S-D-D-S-. By way of another example, E may be KRRTPVRE. By way of yet another example, E may be KNFQSRSH. By way of a further example, E may be KTYASMQW.

[0365] In some embodiments, q is 0. In some embodiments, q is 0, and x is at least 1. In other embodiments, q is 0 and y is at least 4. In other embodiments, q is 0 and y is 6.

[0366] In some embodiments, z is an integer ranging from 1 to 6. In other embodiments, z is an integer ranging from 1 to 4. In yet other embodiments, z is an integer ranging from 1 to 3. In further embodiments, z is 1 or 2. In even further embodiments, z is 1. In even further embodiments, z is 1; and q is 0 and y is 6. In even further embodiments, z is 1; and q is 1 and y is 6.

[0367] In some embodiments q is 0. In some embodiments, q is 0 and [E]_{y} is [DSS]₆.

[0368] In some embodiments, the present disclosure provides for a polypeptide having Formula (IA):

[A]ᵥ-[B]-[C]_{w}-[R]_{q}-([D]ₓ-[E]_{y})_{z}, (IA)
[0369] wherein
[0370] A comprises an amino acid sequence encoding a secretion signal peptide;
[0371] B comprises an amino acid encoding an alkaline phosphatase;
[0372] C comprises an amino acid sequence encoding a GPI anchor;
[0373] R is -(Mₒ(Fc)Nₚ)-, where M and N each independently include between 1 and 6 amino acids, where Fc is a Fc domain, and o and p are each independently 0, 1, or 2;
[0374] D comprises an amino acid sequence having between 4 and 6 amino acids, or is F(G)ₜF, where each F is the same amino acid, G is an amino acid sequence having 3, 4, or 5 amino acids, and t is an integer ranging from 2-5;
[0375] E comprises an amino acid sequence having between 1 and 8 amino acids;
[0376] q is 0 or 1;
[0377] v is 0 or 1;
[0378] w is 0 or 1;
[0379] x is 0 or an integer ranging from 1 to 6;
[0380] y is 0 or an integer ranging from 1 to 16; and
[0381] z is 0 or an integer ranging from 1 to 6;
[0382] provided that the polypeptide of Formula (IA) does not have the amino acid sequence of SEQ ID NO: 1 or does not comprise the amino acid sequence encoded by the nucleotide sequence of SEQ ID NO: 107; or provided that the polypeptide of Formula (IA) is not Strensiq® or Asfotase alfa.

[0383] For example, in some embodiments, the polypeptide of Formula (IA) has an amino acid sequence having 99% identity or less as compared with SEQ ID NO: 1. By way of another example, in some embodiments, the polypeptide of Formula (IA) has an amino acid sequence having 98% identity or less as compared with SEQ ID NO: 1. By way of yet another example, in some embodiments, the polypeptide of Formula (IA) has an amino acid sequence having 97% identity or less as compared with SEQ ID NO: 1. In some embodiments, the polypeptide of Formula (IA) has an amino acid sequence having 96% identity or less as compared with SEQ ID NO: 1. In other embodiments, the polypeptide of Formula (IA) has an amino acid sequence having 95% identity or less as compared with SEQ ID NO: 1.

[0384] In some embodiments, the polypeptide of Formula (IA) is encoded by a nucleotide sequence having less than 99% identity to SEQ ID NO: 107. In some embodiments, the polypeptide of Formula (IA) is encoded by a nucleotide sequence having less than 98% identity to SEQ ID NO: 107. In some embodiments, the polypeptide of Formula (IA) is encoded by a nucleotide sequence having less than 97% identity to SEQ ID NO: 107. In some embodiments, the polypeptide of Formula (IA) is encoded by a nucleotide sequence having less than 96% identity to SEQ ID NO: 107. In some embodiments, the polypeptide of Formula (IA) is encoded by a nucleotide sequence having less than 95% identity to SEQ ID NO: 107.

[0385] In some embodiments, when v is 1, w is 0, q is 1, o is 1, p is 1, N is the diamino acid -D-I-, M is the diamino acid -L-K-, [B] comprises SEQ ID NO: 11, Fc comprises SEQ ID NO: 130, and x is 0, then [E]_{y} is not D₁₀-D₁₆. In some embodiments, when v is 1, w is 0, q is 1, o is 1, p is 1, N is the diamino acid -D-I-, M is the diamino acid -L-K-, [B] comprises SEQ ID NO: 11, Fc comprises SEQ ID NO: 130, and x is 0, then [E]_{y} does not comprise ten to sixteen contiguous aspartic acid residues.

[0386] In some embodiments, the polypeptide of Formula (IA) is not conjugated to a dextran.

[0387] In some embodiments, the polypeptide of Formula (IA) is catalytically competent to allow formation of hydroxyapatite crystals in bone.

[0388] In some embodiments, the amino acid encoding the alkaline phosphatase (“[B]”) is a tissue non-specific alkaline phosphatase. In some embodiments, the amino acid encoding the alkaline phosphatase has at least about 85% identity to SEQ ID NO: 11. In other embodiments, the amino acid encoding the alkaline phosphatase has at least about 90% identity to SEQ ID NO: 11. In other embodiments, the amino acid encoding the alkaline phosphatase has at least about 91% identity to SEQ ID NO: 11. In other embodiments, the amino acid encoding the alkaline phosphatase has at least about 92% identity to SEQ ID NO: 11. In other embodiments, the amino acid encoding the alkaline phosphatase has at least about 93% identity to SEQ ID NO: 11. In other embodiments, the amino acid encoding the alkaline phosphatase has at least about 94% identity to SEQ ID NO: 11.

[0389] In yet other embodiments, the amino acid encoding the alkaline phosphatase has at least about 95% identity to SEQ ID NO: 11. In further embodiments, the amino acid encoding the alkaline phosphatase has at least about 96% identity to SEQ ID NO: 11. In even further embodiments, the amino acid encoding the alkaline phosphatase has at least about 97% identity to SEQ ID NO: 11. In yet even further embodiments, the amino acid encoding the alkaline phosphatase has at least about 98% identity to SEQ ID NO: 11. In yet even further embodiments, the amino acid encoding the alkaline phosphatase has at least about 99% identity to SEQ ID NO: 11. In yet even further embodiments, the amino acid encoding the alkaline phosphatase has at least about 99% identity to SEQ ID NO: 11 and q is 0. In yet even further embodiments, the amino acid encoding the alkaline phosphatase has at least about 99% identity to SEQ ID NO: 11 and q is 1.

[0390] In some embodiments, the amino acid encoding the alkaline phosphatase comprises SEQ ID NO: 11. In some embodiments, the amino acid encoding the alkaline phosphatase comprises SEQ ID NO: 11 and q is 0. In some embodiments, the amino acid encoding the alkaline phosphatase comprises SEQ ID NO: 11 and q is 1.

[0391] In some embodiments, the amino acid encoding the alkaline phosphatase comprises a variant of SEQ ID NO: 11, such as a variant comprising one or more amino acid substitutions. In some embodiments, the amino acid encoding the alkaline phosphatase comprises a variant of SEQ ID NO: 11 having a single amino acid substitution. For instance, a variant of SEQ ID NO: 11 may comprises a C102S substitution. By way of another example, a variant of SEQ ID NO: 11 may comprise an E434G substitution. By way of yet another example, a variant of SEQ ID NO: 11 may comprise an A321H substitution. In some embodiments, the amino acid encoding the alkaline phosphatase comprises a variant of SEQ ID NO: 11 having two amino acid substitutions. For instance, a variant of SEQ ID NO: 11 may comprise any two of a C102S substitution, an E434G substitution, or an A321H substitution, e.g. both an A321H substitution and an E434G substitution. In some embodiments, the amino acid encoding the alkaline phosphatase comprises a variant of SEQ ID NO: 11 having three amino acid substitutions. In some embodiments, the amino acid encoding the alkaline phosphatase comprises a variant of SEQ ID NO: 11 having four amino acid substitutions. In some embodiments, the amino acid encoding the alkaline phosphatase comprises a variant of SEQ ID NO: 11 having five amino acid substitutions. In some embodiments, the amino acid encoding the alkaline phosphatase comprises a variant of SEQ ID NO: 11 having six amino acid substitutions.

[0392] In some embodiments, the amino acid encoding the secretion signal peptide has at least 90% sequence identity to SEQ ID NO: 12. In other embodiments, the amino acid encoding the secretion signal peptide has at least 95% sequence identity to SEQ ID NO: 12. In yet other embodiments, the amino acid encoding the secretion signal peptide has at least 96% sequence identity to SEQ ID NO: 12. In further embodiments, the amino acid encoding the secretion signal peptide has at least 97% sequence identity to SEQ ID NO: 12. In yet further embodiments, the amino acid encoding the secretion signal peptide has at least 98% sequence identity to SEQ ID NO: 12. In even further embodiments, the amino acid encoding the secretion signal peptide has at least 99% sequence identity to SEQ ID NO: 12. In yet even further embodiments, the amino acid encoding the secretion signal peptide comprises SEQ ID NO: 12. In yet even other embodiments, the amino acid encoding the secretion signal peptide comprises SEQ ID NO: 12, and wherein [D]ₓ is [-GGGGS-]₂. In yet even other embodiments, the amino acid encoding the secretion signal peptide comprises SEQ ID NO: 12, and wherein [E]_{y} is [-DSS-]₆. In yet even other embodiments, the amino acid encoding the secretion signal peptide comprises SEQ ID NO: 12; [E]_{y} is [-DSS-]₆, and q is 0. In yet even other embodiments, the amino acid encoding the secretion signal peptide comprises SEQ ID NO: 12; [E]_{y} is [-DSS-]₆, and q is 1.

[0393] In some embodiments, the amino acid encoding the secretion signal peptide has at least 90% sequence identity to any one of SEQ ID NOS: 33-43. In other embodiments, the amino acid encoding the secretion signal peptide has at least 95% sequence identity to any one of SEQ ID NOS: 33-43. In yet other embodiments, the amino acid encoding the secretion signal peptide has at least 96% sequence identity to any one of SEQ ID NOS: 33-43. In further embodiments, the amino acid encoding the secretion signal peptide has at least 97% sequence identity to any one of SEQ ID NOS: 33-43. In yet further embodiments, the amino acid encoding the secretion signal peptide has at least 98% sequence identity to any one of SEQ ID NOS: 33-43. In even further embodiments, the amino acid encoding the secretion signal peptide has at least 99% sequence identity to any one of SEQ ID NOS: 33-43. In yet even further embodiments, the amino acid encoding the secretion signal peptide comprises any one of SEQ ID NOS: 33-43. In yet even other embodiments, the amino acid encoding the secretion signal peptide comprises any one of SEQ ID NOS: 33-43, and wherein [E]_{y} is [-DSS-]₆. In yet even other embodiments, the amino acid encoding the secretion signal peptide comprises any one of SEQ ID NOS: 33-43, [E]_{y} is [-DSS-]₆, and q is 0. In yet even other embodiments, the amino acid encoding the secretion signal peptide comprises any one of SEQ ID NOS: 33-43, [E]_{y} is [-DSS-]₆, and q is 1.

[0394] In some embodiments, the amino acid encoding the GPI anchor has at least 90% sequence identity to SEQ ID NO: 13. In other embodiments, the amino acid encoding the GPI anchor has at least 95% sequence identity to SEQ ID NO: 13. In yet other embodiments, the amino acid encoding the GPI anchor has at least 96% sequence identity to SEQ ID NO: 13. In further embodiments, the amino acid encoding the GPI anchor has at least 97% sequence identity to SEQ ID NO: 13. In yet further embodiments, the amino acid encoding the GPI anchor has at least 98% sequence identity to SEQ ID NO: 13. In even further embodiments, the amino acid encoding the GPI anchor has at least 99% sequence identity to SEQ ID NO: 13. In yet even further embodiments, the amino acid encoding the GPI anchor comprises SEQ ID NO: 13. In yet even other embodiments the amino acid encoding the GPI anchor comprises SEQ ID NO: 13, and wherein [E]_{y} is [-DSS-]₆. In yet even other embodiments, the amino acid encoding the GPI anchor comprises SEQ ID NO: 13; [E]_{y} is [-DSS-]₆, and q is 0. In yet even other embodiments, the amino acid encoding the GPI anchor comprises SEQ ID NO: 13; [E]_{y} is [-DSS-]₆, and q is 1.

[0395] In some embodiments, the amino acid encoding the GPI anchor has at least 90% sequence identity to SEQ ID NO: 14. In other embodiments, the amino acid encoding the GPI anchor has at least 95% sequence identity to SEQ ID NO: 14. In yet other embodiments, the amino acid encoding the GPI anchor has at least 96% sequence identity to SEQ ID NO: 14. In further embodiments, the amino acid encoding the GPI anchor has at least 97% sequence identity to SEQ ID NO: 14. In yet further embodiments, the amino acid encoding the GPI anchor has at least 98% sequence identity to SEQ ID NO: 14. In even further embodiments, the amino acid encoding the GPI anchor has at least 99% sequence identity to SEQ ID NO: 14. In yet even further embodiments, the amino acid encoding the GPI anchor comprises SEQ ID NO: 14. In yet even other embodiments the amino acid encoding the GPI anchor comprises SEQ ID NO: 14, and wherein [E]_{y} is [-DSS-]₆. In yet even other embodiments, the amino acid encoding the GPI anchor comprises SEQ ID NO: 14; [E]_{y} is [-DSS-]₆, and q is 0. In yet even other embodiments, the amino acid encoding the GPI anchor comprises SEQ ID NO: 14; [E]_{y} is [-DSS-]₆, and q is 1.

[0396] In some embodiments, at least one of v or w is 0 and the amino acid encoding the alkaline phosphatase has at least about 90% identity to SEQ ID NO: 11. In other embodiments, at least one of v or w is 0 and the amino acid encoding the alkaline phosphatase has at least about 95% identity to SEQ ID NO: 11. In further embodiments, at least one of v or w is 0 and the amino acid encoding the alkaline phosphatase has at least about 96% identity to SEQ ID NO: 11. In even further embodiments, at least one of v or w is 0 and the amino acid encoding the alkaline phosphatase has at least about 97% identity to SEQ ID NO: 11. In yet even further embodiments, at least one of v or w is 0 and the amino acid encoding the alkaline phosphatase has at least about 98% identity to SEQ ID NO: 11. In yet even further embodiments, at least one of v or w is 0 and the amino acid encoding the alkaline phosphatase has at least about 99% identity to SEQ ID NO: 11. In other embodiments, at least one of v or w is 0 and the amino acid encoding the alkaline phosphatase comprises SEQ ID NO: 11.

[0397] In some embodiments, at least one of v or w is 0; q is 0; and the amino acid encoding the alkaline phosphatase comprises SEQ ID NO: 11. In some embodiments, at least one of v or w is 0; q is 0; [E]_{y} is [DSS]₆; and the amino acid encoding the alkaline phosphatase comprises SEQ ID NO: 11.

[0398] In some embodiments, at least one of v or w is 0; q is 1; [E]_{y} is [DSS]₆; and the amino acid encoding the alkaline phosphatase comprises SEQ ID NO: 11. In some embodiments, at least one of v or w is 0; q is 1; [E]_{y} is [DSS]₆; the amino acid encoding the alkaline phosphatase comprises SEQ ID NO: 11; and [A] comprises at least 99% identity to any one of SEQ ID NOS: 12 and 33-43. In some embodiments, at least one of v or w is 0; q is 1; [E]_{y} is [DSS]₆; the amino acid encoding the alkaline phosphatase comprises SEQ ID NO: 11; and [A] comprises any one of SEQ ID NOS: 12 and 33-43.

[0399] In some embodiments, at least one of v or w is 0, the amino acid encoding the alkaline phosphatase has at least about 90% identity to SEQ ID NO: 11, and x+y=8 to 12. In some embodiments, at least one of v or w is 0, the amino acid encoding the alkaline phosphatase has at least about 95% identity to SEQ ID NO: 11, and x+y=8 to 12. In some embodiments, at least one of v or w is 0, the amino acid encoding the alkaline phosphatase has at least about 96% identity to SEQ ID NO: 11, and x+y=8 to 12. In some embodiments, at least one of v or w is 0, the amino acid encoding the alkaline phosphatase has at least about 97% identity to SEQ ID NO: 11, and x+y=8 to 12. In some embodiments, at least one of v or w is 0, the amino acid encoding the alkaline phosphatase has at least about 98% identity to SEQ ID NO: 11, and x+y=8 to 12. In some embodiments, at least one of v or w is 0, the amino acid encoding the alkaline phosphatase has at least about 99% identity to SEQ ID NO: 11, and x+y=8 to 12. In some embodiments, at least one of v or w is 0, the amino acid encoding the alkaline phosphatase comprises SEQ ID NO: 11, and x+y=8 to 12. In some embodiments, at least one of v or w is 0, the amino acid encoding the alkaline phosphatase comprises SEQ ID NO: 11, and x+y=8 to 12.

[0400] In some embodiments, at least one of v or w is 0, the amino acid encoding the alkaline phosphatase comprises SEQ ID NO: 11, and x+y=8 to 12, and q is 0.

[0401] In some embodiments, at least one of v or w is 0, the amino acid encoding the alkaline phosphatase comprises SEQ ID NO: 11, and x+y=8 to 12, and q is 1. In some embodiments, at least one of v or w is 0, the amino acid encoding the alkaline phosphatase comprises SEQ ID NO: 11, and x+y=8 to 12, q is 1; and R is (-[LK]-Fc-[DI]-). In some embodiments, at least one of v or w is 0, the amino acid encoding the alkaline phosphatase comprises SEQ ID NO: 11, and x+y=8 to 12, q is 1; and R is (-[LK]-Fc-[DI]-), and [A] comprises an amino acid sequence having at least 95% identity to any one of SEQ ID NOS: 12 and 33-43. In some embodiments, at least one of v or w is 0, the amino acid encoding the alkaline phosphatase comprises SEQ ID NO: 11, and x+y=8 to 12, q is 1; and R is (-[LK]-Fc-[DI]-), and [A] comprises an amino acid sequence having at least 96% identity to any one of SEQ ID NOS: 12 and 33-43. In some embodiments, at least one of v or w is 0, the amino acid encoding the alkaline phosphatase comprises SEQ ID NO: 11, and x+y=8 to 12, q is 1; and R is (-[LK]-Fc-[DI]-), and [A] comprises an amino acid sequence having at least 97% identity to any one of SEQ ID NOS: 12 and 33-43. In some embodiments, at least one of v or w is 0, the amino acid encoding the alkaline phosphatase comprises SEQ ID NO: 11, and x+y=8 to 12, q is 1; and R is (-[LK]-Fc-[DI]-), and [A] comprises an amino acid sequence having at least 98% identity to any one of SEQ ID NOS: 12 and 33-43. In some embodiments, at least one of v or w is 0, the amino acid encoding the alkaline phosphatase comprises SEQ ID NO: 11, and x+y=8 to 12, q is 1; and R is (-[LK]-Fc-[DI]-), and [A] comprises an amino acid sequence having at least 99% identity to any one of SEQ ID NOS: 12 and 33-43. In some embodiments, at least one of v or w is 0, the amino acid encoding the alkaline phosphatase comprises SEQ ID NO: 11, and x+y=8 to 12, q is 1; and R is (-[LK]-Fc-[DI]-), and [A] comprises an amino acid sequence having any one of SEQ ID NOS: 12 and 33-43.

[0402] In some embodiments, v is 1 and w is 0, the amino acid encoding the alkaline phosphatase has at least about 90% identity to SEQ ID NO: 11, and x+y=8 to 12. In some embodiments, v is 1 and w is 0, the amino acid encoding the alkaline phosphatase has at least about 95% identity to SEQ ID NO: 11, and x+y=8 to 12. In some embodiments, v is 1 and w is 0, the amino acid encoding the alkaline phosphatase has at least about 96% identity to SEQ ID NO: 11, and x+y=8 to 12. In some embodiments, v is 1 and w is 0, the amino acid encoding the alkaline phosphatase has at least about 97% identity to SEQ ID NO: 11, and x+y=8 to 12. In some embodiments, v is 1 and w is 0, the amino acid encoding the alkaline phosphatase has at least about 98% identity to SEQ ID NO: 11, and x+y=8 to 12. In some embodiments, v is 1 and w is 0, the amino acid encoding the alkaline phosphatase has at least about 99% identity to SEQ ID NO: 11, and x+y=8 to 12. In some embodiments, v is 1 and w is 0, the amino acid encoding the alkaline phosphatase comprises SEQ ID NO: 11, and x+y=8 to 12. In some embodiments, v is 1 and w is 0, the amino acid encoding the alkaline phosphatase comprises SEQ ID NO: 11, and x+y=8 to 12 and q is 1.

[0403] In some embodiments, v is 1 and w is 0, the amino acid encoding the alkaline phosphatase comprises SEQ ID NO: 11, and x+y=8 to 12 and q is 0.

[0404] In some embodiments, the amino acid encoding the alkaline phosphatase has at least about 95% identity to SEQ ID NO: 11, x+y=8 to 12, and where x and y are both at least 1. In some embodiments, the amino acid encoding the alkaline phosphatase has at least about 97% identity to SEQ ID NO: 11, x+y=8 to 12, and where x and y are both at least 1. In some embodiments, the amino acid encoding the alkaline phosphatase has at least about 99% identity to SEQ ID NO: 11, x+y=8 to 12, and where x and y are both at least 1. In some embodiments, the amino acid encoding the alkaline phosphatase has at least about 99% identity to SEQ ID NO: 11, x+y=8 to 12, where x and y are both at least 1; and q is 0. In some embodiments, the amino acid encoding the alkaline phosphatase has at least about 99% identity to SEQ ID NO: 11, x+y=8 to 12, where x and y are both at least 1; and q is 1. In some embodiments, the amino acid encoding the alkaline phosphatase has at least about 99% identity to SEQ ID NO: 11, and x+y=8 to 12, where x and y are both at least 1; q is 1; and R is (-[LK]-Fc-[DI]-).

[0405] In some embodiments, at least one of v or w is 0, the amino acid encoding the alkaline phosphatase has at least about 90% identity to SEQ ID NO: 11, and x+y=4 to 8. In some embodiments, at least one of v or w is 0, the amino acid encoding the alkaline phosphatase has at least about 95% identity to SEQ ID NO: 11, and x+y=4 to 8. In some embodiments, at least one of v or w is 0, the amino acid encoding the alkaline phosphatase has SEQ ID NO: 11, and x+y=4 to 8.

[0406] In some embodiments, v is 1, w is 0, the amino acid encoding the alkaline phosphatase has at least about 90% identity to SEQ ID NO: 11, and x+y=4 to 8. In some embodiments, v is 1, w is 0, the amino acid encoding the alkaline phosphatase has at least about 95% identity to SEQ ID NO: 11, and x+y=4 to 8. In some embodiments, v is 1, w is 0, the amino acid encoding the alkaline phosphatase has at least about 96% identity to SEQ ID NO: 11, and wherein x+y=4 to 8. In some embodiments, v is 1, w is 0, the amino acid encoding the alkaline phosphatase has at least about 97% identity to SEQ ID NO: 11, and x+y=4 to 8. In some embodiments, v is 1, w is 0, the amino acid encoding the alkaline phosphatase has at least about 98% identity to SEQ ID NO: 11, and x+y=4 to 8. In some embodiments, v is 1, w is 0, the amino acid encoding the alkaline phosphatase has at least about 99% identity to SEQ ID NO: 11, and x+y=4 to 8. In some embodiments, v is 1, w is 0, the amino acid encoding the alkaline phosphatase comprises SEQ ID NO: 11, and x+y=4 to 8.

[0407] In some embodiments, v is 1, w is 0, the amino acid encoding the alkaline phosphatase comprises SEQ ID NO: 11, x+y=4 to 8 and q is 0.

[0408] In some embodiments, v is 1, w is 0, the amino acid encoding the alkaline phosphatase comprises SEQ ID NO: 11, x+y=4 to 8 and q is 1. In some embodiments, v is 1, w is 0, the amino acid encoding the alkaline phosphatase comprises SEQ ID NO: 11, x+y=4 to 8, q is 1; and R is (-[LK]-Fc-[DI]-). In some embodiments, v is 1, w is 0, the amino acid encoding the alkaline phosphatase comprises SEQ ID NO: 11, x+y=5 to 7, q is 1; and R is (-[LK]-Fc-[DI]-). In some embodiments, v is 1, w is 0, the amino acid encoding the alkaline phosphatase comprises SEQ ID NO: 11, x+y=6, q is 1; and R is (-[LK]-Fc-[DI]-). In some embodiments, v is 1, w is 0, the amino acid encoding the alkaline phosphatase comprises SEQ ID NO: 11, x+y=6, q is 1; R is (-[LK]-Fc-[DI]-), and [A] comprises an amino acid sequence having at least 95% identity to any one of SEQ ID NOS: 12 and 33-43. In some embodiments, v is 1, w is 0, the amino acid encoding the alkaline phosphatase comprises SEQ ID NO: 11, x+y=6, q is 1; R is (-[LK]-Fc-[DI]-), and [A] comprises an amino acid sequence having at least 96% identity to any one of SEQ ID NOS: 12 and 33-43. In some embodiments, v is 1, w is 0, the amino acid encoding the alkaline phosphatase comprises SEQ ID NO: 11, x+y=6, q is 1; R is (-[LK]-Fc-[DI]-), [A] comprises an amino acid sequence having at least 97% identity to any one of SEQ ID NOS: 12 and 33-43. In some embodiments, v is 1, w is 0, the amino acid encoding the alkaline phosphatase comprises SEQ ID NO: 11, x+y=6 and q is 1; R is (-[LK]-Fc-[DI]-), and [A] comprises an amino acid sequence having at least 98% identity to any one of SEQ ID NOS: 12 and 33-43. In some embodiments, v is 1, w is 0, the amino acid encoding the alkaline phosphatase comprises SEQ ID NO: 11, x+y=6, q is 1; R is (-[LK]-Fc-[DI]-), and [A] comprises an amino acid sequence having at least 99% identity to any one of SEQ ID NOS: 12 and 33-43. In some embodiments, v is 1, w is 0, the amino acid encoding the alkaline phosphatase comprises SEQ ID NO: 11, x+y=6, q is 1; R is (-[LK]-Fc-[DI]-) and [A] comprises any one of SEQ ID NOS: 12 and 33-43.

[0409] In some embodiments, [A]ᵥ-[B]-[C]_{w} comprises an amino acid sequence having at least 85% sequence identity to SEQ ID NO: 10. In some embodiments, [A]ᵥ-[B]-[C]_{w} comprises an amino acid sequence having at least 90% sequence identity to SEQ ID NO: 10. In some embodiments, [A]ᵥ-[B]-[C]_{w} comprises an amino acid sequence having at least 95% sequence identity to SEQ ID NO: 10. In some embodiments, [A]ᵥ-[B]-[C]_{w} comprises an amino acid sequence having at least 96% sequence identity to SEQ ID NO: 10. In some embodiments, [A]ᵥ-[B]-[C]_{w} comprises an amino acid sequence having at least 97% sequence identity to SEQ ID NO: 10. In some embodiments, [A]ᵥ-[B]-[C]_{w} comprises an amino acid sequence having at least 98% sequence identity to SEQ ID NO: 10. In some embodiments, [A]ᵥ-[B]-[C]_{w} comprises an amino acid sequence having at least 99% sequence identity to SEQ ID NO: 10. In some embodiments, [A]ᵥ-[B]-[C]_{w} comprises an amino acid sequence comprising SEQ ID NO: 10. In some embodiments, [A]ᵥ-[B]-[C]_{w} comprises an amino acid sequence having at least 97% identity to SEQ ID NO: 10; and wherein [E]_{y} is [-DSS-]₆. In some embodiments, [A]ᵥ-[B]-[C]_{w} comprises an amino acid sequence having at least 98% identity to SEQ ID NO: 10; and wherein [E]_{y} is [-DSS-]₆. In some embodiments, [A]ᵥ-[B]-[C]_{w} comprises an amino acid sequence having at least 99% identity to SEQ ID NO: 10; and wherein [E]_{y} is [-DSS-]₆. In some embodiments, [A]ᵥ-[B]-[C]_{w} comprises an amino acid sequence comprising SEQ ID NO: 10; and wherein [E]_{y} is [-DSS-]₆.

[0410] In some embodiments, [A]ᵥ-[B]-[C]_{w} comprises an amino acid sequence having at least 85% sequence identity to any one of SEQ ID NOS: 27-32. In some embodiments, [A]ᵥ-[B]-[C]_{w} comprises an amino acid sequence having at least 90% sequence identity to any one of SEQ ID NOS: 27-32. In some embodiments, [A]ᵥ-[B]-[C]_{w} comprises an amino acid sequence having at least 95% sequence identity to any one of SEQ ID NOS: 27-32. In some embodiments, [A]ᵥ-[B]-[C]_{w} comprises an amino acid sequence having at least 96% sequence identity to any one of SEQ ID NOS: 27-32. In some embodiments, [A]ᵥ-[B]-[C]_{w} comprises an amino acid sequence having at least 97% sequence identity to any one of SEQ ID NOS: 27-32. In some embodiments, [A]ᵥ-[B]-[C]_{w} comprises an amino acid sequence having at least 98% sequence identity to any one of SEQ ID NOS: 27-32. In some embodiments, [A]ᵥ-[B]-[C]_{w} comprises an amino acid sequence having at least 99% sequence identity to any one of SEQ ID NOS: 27-32. In some embodiments, [A]ᵥ-[B]-[C]_{w} comprises an amino acid sequence comprising any one of SEQ ID NOS: 27-32.

[0411] In some embodiments, [A]ᵥ-[B]-[C]_{w} comprises an amino acid sequence having at least 90% sequence identity to any one of SEQ ID NOS: 10 and 27-32, and wherein x+y is 4 to 8. In some embodiments, [A]ᵥ-[B]-[C]_{w} comprises an amino acid sequence having at least 95% sequence identity to any one of SEQ ID NOS: 10 and 27-32, and wherein x+y is 4 to 8. In some embodiments, [A]ᵥ-[B]-[C]_{w} comprises an amino acid sequence having at least 96% sequence identity to any one of SEQ ID NOS: 10 and 27-32, and wherein x+y is 4 to 8. In some embodiments, [A]ᵥ-[B]-[C]_{w} comprises an amino acid sequence having at least 97% sequence identity to any one of SEQ ID NOS: 10 and 27-32, and wherein x+y is 4 to 8. In some embodiments, [A]ᵥ-[B]-[C]_{w} comprises an amino acid sequence having at least 98% sequence identity to any one of SEQ ID NOS: 10 and 27-32, and wherein x+y is 4 to 8. In some embodiments, [A]ᵥ-[B]-[C]_{w} comprises an amino acid sequence having at least 99% sequence identity to any one of SEQ ID NOS: 10 and 27-32, and wherein x+y is 4 to 8. In some embodiments, [A]ᵥ-[B]-[C]_{w} comprises an amino acid sequence comprising any one of SEQ ID NOS: 10 and 27-32, and wherein x+y is 4 to 8.

[0412] In some embodiments, [A]ᵥ-[B]-[C]_{w} comprises an amino acid sequence comprising any one of SEQ ID NOS: 10 and 27-32; wherein x+y is 4 to 8; and wherein q is 0. In some embodiments, [A]ᵥ-[B]-[C]_{w} comprises an amino acid sequence comprising any one of SEQ ID NOS: 10 and 27-32; wherein x+y is 4 to 8; and wherein q is 0 and z is 1.

[0413] In some embodiments, [A]ᵥ-[B]-[C]_{w} comprises an amino acid sequence comprising any one of SEQ ID NOS: 10 and 27-32; wherein x+y is 4 to 8; and wherein q is 1. In some embodiments, [A]ᵥ-[B]-[C]_{w} comprises an amino acid sequence comprising any one of SEQ ID NOS: 10 and 27-32; wherein x+y is 4 to 8; and wherein q is 1 and z is 1.

[0414] In some embodiments, [A]ᵥ-[B]-[C]_{w} comprises an amino acid sequence having at least 97% sequence identity to any one of SEQ ID NOS: 27-32; and wherein [E]_{y} is [-DSS-]₆. In some embodiments, [A]ᵥ-[B]-[C]_{w} comprises an amino acid sequence having at least 98% sequence identity to any one of SEQ ID NOS: 27-32; and wherein [E]_{y} is [-DSS-]₆. In some embodiments, [A], —[B]-[C]_{w} comprises an amino acid sequence having at least 99% sequence identity to any one of SEQ ID NOS: 27-32; and wherein [E]_{y} is [-DSS-]₆. In some embodiments, [A]ᵥ-[B]-[C]_{w} comprises an amino acid sequence comprising any one of SEQ ID NOS: 27-32, and wherein [E]_{y} is [-DSS-]₆.

[0415] In some embodiments, [A]ᵥ-[B]-[C]_{w} comprises an amino acid sequence having at least 90% sequence identity to any one of SEQ ID NOS: 10 and 27-32, and wherein x+y is 8 to 12. In some embodiments, [A]ᵥ-[B]-[C]_{w} comprises an amino acid sequence having at least 95% sequence identity to any one of SEQ ID NOS: 10 and 27-32, and wherein x+y is 8 to 12. In some embodiments, [A], —[B]-[C]_{w} comprises an amino acid sequence having at least 96% sequence identity to any one of SEQ ID NOS: 10 and 27-32, and wherein x+y is 8 to 12. In some embodiments, [A]ᵥ-[B]-[C]_{w} comprises an amino acid sequence having at least 97% sequence identity to any one of SEQ ID NOS: 10 and 27-32, and wherein x+y is 8 to 12. In some embodiments, [A]ᵥ-[B]-[C]_{w} comprises an amino acid sequence having at least 98% sequence identity to any one of SEQ ID NOS: 10 and 27-32, and wherein x+y is 8 to 12. In some embodiments, [A]ᵥ-[B]-[C]_{w} comprises an amino acid sequence having at least 99% sequence identity to any one of SEQ ID NOS: 10 and 27-32, and wherein x+y is 8 to 12. In some embodiments, [A]ᵥ-[B]-[C]_{w} comprises an amino acid sequence comprising any one of SEQ ID NOS: 10 and 27-32, and wherein x+y is 8 to 12.

[0416] In some embodiments, [A]ᵥ-[B]-[C]_{w} comprises an amino acid sequence comprising any one of SEQ ID NOS: 10 and 27-32, wherein x+y is 8 to 12, and wherein q is 0. In some embodiments, [A]ᵥ-[B]-[C]_{w} comprises an amino acid sequence comprising any one of SEQ ID NOS: 10 and 27-32, wherein x+y is 8 to 12, and wherein q is 0 and z is 1. In some embodiments, [A]ᵥ-[B]-[C]_{w} comprises an amino acid sequence comprising any one of SEQ ID NOS: 10 and 27-32, wherein x+y is 8 to 12, and wherein q is 1. In some embodiments, [A], [B]-[C]_{w} comprises an amino acid sequence comprising any one of SEQ ID NOS: 10 and 27-32, wherein x+y is 8 to 12, and wherein q is 1 and z is 1. In some embodiments, [A]ᵥ-[B]-[C]_{w} comprises an amino acid sequence comprising any one of SEQ ID NOS: 10 and 27-32, wherein x+y is 8 to 12, wherein q is 1, z is 1, and [E]_{y} is [-DSS-] 6. In some embodiments, [A]ᵥ-[B]-[C]_{w} comprises an amino acid sequence comprising any one of SEQ ID NOS: 10 and 27-32, wherein x+y is 8 to 12, wherein q is 1, z is 1, and [E]_{y} is [-D-]₁₀.

[0417] In some embodiments, the Fc domain has at least 90% sequence identity to that of SEQ ID NO: 130. In some embodiments, the Fc domain has at least 91% sequence identity to that of SEQ ID NO: 130. In some embodiments, the Fc domain has at least 92% sequence identity to that of SEQ ID NO: 130. In some embodiments, the Fc domain has at least 93% sequence identity to that of SEQ ID NO: 130. In some embodiments, the Fc domain has at least 94% sequence identity to that of SEQ ID NO: 130. In some embodiments, the Fc domain has at least 95% sequence identity to that of SEQ ID NO: 130. In some embodiments, the Fc domain has at least 96% sequence identity to that of SEQ ID NO: 130. In some embodiments, the Fc domain has at least 97% sequence identity to that of SEQ ID NO: 130. In some embodiments, the Fc domain has at least 98% sequence identity to that of SEQ ID NO: 130. In some embodiments, the Fc domain has at least 99% sequence identity to that of SEQ ID NO: 130. In some embodiments, the Fc domain comprises SEQ ID NO: 130. In some embodiments, the Fc domain comprises SEQ ID NO: 130 and y ranges from 4 to 6. In some embodiments, the Fc domain comprises SEQ ID NO: 130 and [E]_{y} is [DSS]₆. In some embodiments, the R comprises SEQ ID NO: 9 and [E]_{y} is [DSS]₆.

[0418] In some embodiments, M comprises one or more amino acids selected from glycine, serine, threonine, alanine, lysine, and glutamic acid. In some embodiments, M comprises 2 amino acids. For example, M may comprise leucine and lysine. In some embodiments, M is leucine-lysine. By way of another example, M may comprise two alanine amino acids In other embodiments, M comprises three amino acids.

[0419] In some embodiments, N comprises one or more amino acids selected from glycine, serine, threonine, alanine, lysine, and glutamic acid. In some embodiments, N comprises 2 amino acids (i.e., a diamino acid). For example, N may comprise aspartic acid and isoleucine. By way of another example, N may comprise two alanine amino acids. In some embodiments, N is aspartic acid—isoleucine. In other embodiments, N comprises 3 amino acids.

[0420] In some embodiments, M is leucine-lysine and N is aspartic acid—isoleucine. In some embodiments, M is leucine-lysine and N is aspartic acid—isoleucine and Fc has at least 90% sequence identity to that of SEQ ID NO: 130. In some embodiments, M is leucine-lysine and N is aspartic acid—isoleucine and Fc has at least 91% sequence identity to that of SEQ ID NO: 130. In some embodiments, M is leucine-lysine and N is aspartic acid—isoleucine and Fc has at least 92% sequence identity to that of SEQ ID NO: 130. In some embodiments, M is leucine-lysine and N is aspartic acid—isoleucine and Fc has at least 93% sequence identity to that of SEQ ID NO: 130. In some embodiments, M is leucine-lysine and N is aspartic acid—isoleucine and Fc has at least 94% sequence identity to that of SEQ ID NO: 130. In some embodiments, M is leucine-lysine and N is aspartic acid—isoleucine and Fc has at least 95% sequence identity to that of SEQ ID NO: 130. In some embodiments, M is leucine-lysine and N is aspartic acid—isoleucine and Fc has at least 96% sequence identity to that of SEQ ID NO: 130. In some embodiments, M is leucine-lysine and N is aspartic acid—isoleucine and Fc has at least 97% sequence identity to that of SEQ ID NO: 130. In some embodiments, M is leucine-lysine and N is aspartic acid—isoleucine and Fc has at least 98% sequence identity to that of SEQ ID NO: 130. In some embodiments, M is leucine-lysine and N is aspartic acid—isoleucine and Fc has at least 99% sequence identity to that of SEQ ID NO: 130. In some embodiments, M is leucine-lysine and N is aspartic acid—isoleucine and Fc comprises SEQ ID NO: 130.

[0421] In some embodiments, M is leucine-lysine and N is aspartic acid—isoleucine; and o, p, and q are each 1. In some embodiments, M is leucine-lysine and N is aspartic acid—isoleucine and Fc has at least 90% sequence identity to that of SEQ ID NO: 130; and o, p, and q are each 1. In some embodiments, M is leucine-lysine and N is aspartic acid—isoleucine and Fc has at least 91% sequence identity to that of SEQ ID NO: 130; and o, p, and q are each 1. In some embodiments, M is leucine-lysine and N is aspartic acid—isoleucine and Fc has at least 92% sequence identity to that of SEQ ID NO: 130; and o, p, and q are each 1. In some embodiments, M is leucine-lysine and N is aspartic acid—isoleucine and Fc has at least 93% sequence identity to that of SEQ ID NO: 130; and o, p, and q are each 1. In some embodiments, M is leucine-lysine and N is aspartic acid—isoleucine and Fc has at least 94% sequence identity to that of SEQ ID NO: 130; and o, p, and q are each 1. In some embodiments, M is leucine-lysine and N is aspartic acid—isoleucine and Fc has at least 95% sequence identity to that of SEQ ID NO: 130; and o, p, and q are each 1. In some embodiments, M is leucine-lysine and N is aspartic acid—isoleucine and Fc has at least 96% sequence identity to that of SEQ ID NO: 130; and o, p, and q are each 1. In some embodiments, M is leucine-lysine and N is aspartic acid—isoleucine and Fc has at least 97% sequence identity to that of SEQ ID NO: 130; and o, p, and q are each 1. In some embodiments, M is leucine-lysine and N is aspartic acid—isoleucine and Fc has at least 98% sequence identity to that of SEQ ID NO: 130; and o, p, and q are each 1. In some embodiments, M is leucine-lysine and N is aspartic acid—isoleucine and Fc has at least 99% sequence identity to that of SEQ ID NO: 130; and o, p, and q are each 1. In some embodiments, M is leucine-lysine; N is aspartic acid—isoleucine and Fc comprises SEQ ID NO: 130; and o, p, and q are each 1. In some embodiments, M is leucine-lysine; N is aspartic acid—isoleucine; Fc comprises SEQ ID NO: 130; o, p, and q are each 1; and [A] has at least 99% identity to any one of SEQ ID NOS: 12 and 33-43. In some embodiments, M is leucine-lysine; N is aspartic acid—isoleucine; Fc comprises SEQ ID NO: 130; o, p, and q are each 1; and [A] comprises any one of SEQ ID NOS: 12 and 33-43.

[0422] In some embodiments, M is leucine-lysine and N is aspartic acid—isoleucine; o, p, q, and z are each 1; and x is 0. In some embodiments, M is leucine-lysine and N is aspartic acid—isoleucine and Fc has at least 90% sequence identity to that of SEQ ID NO: 130; o, p, q, and z are each 1; and x is 0. In some embodiments, M is leucine-lysine and N is aspartic acid—isoleucine and Fc has at least 91% sequence identity to that of SEQ ID NO: 130; o, p, q, and z are each 1; and x is 0. In some embodiments, M is leucine-lysine and N is aspartic acid—isoleucine and Fc has at least 92% sequence identity to that of SEQ ID NO: 130; o, p, q, and z are each 1; and x is 0. In some embodiments, M is leucine-lysine and N is aspartic acid—isoleucine and Fc has at least 93% sequence identity to that of SEQ ID NO: 130; o, p, q, and z are each 1; and x is 0. In some embodiments, M is leucine-lysine and N is aspartic acid—isoleucine and Fc has at least 94% sequence identity to that of SEQ ID NO: 130; o, p, q, and z are each 1; and x is 0. In some embodiments, M is leucine-lysine and N is aspartic acid—isoleucine and Fc has at least 95% sequence identity to that of SEQ ID NO: 130; o, p, q, and z are each 1; and x is 0. In some embodiments, M is leucine-lysine and N is aspartic acid—isoleucine and Fc has at least 96% sequence identity to that of SEQ ID NO: 130; o, p, q, and z are each 1; and x is 0. In some embodiments, M is leucine-lysine and N is aspartic acid—isoleucine and Fc has at least 97% sequence identity to that of SEQ ID NO: 130; o, p, q, and z are each 1; and x is 0. In some embodiments, M is leucine-lysine and N is aspartic acid—isoleucine and Fc has at least 98% sequence identity to that of SEQ ID NO: 130; o, p, q, and z are each 1; and x is 0. In some embodiments, M is leucine-lysine and N is aspartic acid—isoleucine and Fc has at least 99% sequence identity to that of SEQ ID NO: 130; o, p, q, and z are each 1; and x is 0. In some embodiments, M is leucine-lysine and N is aspartic acid—isoleucine and Fc comprises SEQ ID NO: 130; o, p, q, and z are each 1; and x is 0. In some embodiments, M is leucine-lysine and N is aspartic acid—isoleucine and Fc comprises SEQ ID NO: 130; o, p, q, and z are each 1; x is 0; and [A] has at least 99% identity to any one of SEQ ID NOS: 12 and 33-43. In some embodiments, M is leucine-lysine and N is aspartic acid—isoleucine and Fc comprises SEQ ID NO: 130; o, p, q, and z are each 1; x is 0; and [A] comprises any one of SEQ ID NOS: 12 and 33-43.

[0423] In some embodiments, M is leucine-lysine and N is aspartic acid—isoleucine; o, p, q, and z are each 1; x is 0; and y is 4-8. In some embodiments, M is leucine-lysine and N is aspartic acid—isoleucine and Fc has at least 90% sequence identity to that of SEQ ID NO: 130; o, p, q, and z are each 1; x is 0; and y is 4-8. In some embodiments, M is leucine-lysine and N is aspartic acid—isoleucine and Fc has at least 91% sequence identity to that of SEQ ID NO: 130; o, p, q, and z are each 1; x is 0; and y is 4-8. In some embodiments, M is leucine-lysine and N is aspartic acid—isoleucine and Fc has at least 92% sequence identity to that of SEQ ID NO: 130; o, p, q, and z are each 1; x is 0; and y is 4-8. In some embodiments, M is leucine-lysine and N is aspartic acid—isoleucine and Fc has at least 93% sequence identity to that of SEQ ID NO: 130; o, p, q, and z are each 1; x is 0; and y is 4-8. In some embodiments, M is leucine-lysine and N is aspartic acid—isoleucine and Fc has at least 94% sequence identity to that of SEQ ID NO: 130; o, p, q, and z are each 1; x is 0; and y is 4-8. In some embodiments, M is leucine-lysine and N is aspartic acid—isoleucine and Fc has at least 95% sequence identity to that of SEQ ID NO: 130; o, p, q, and z are each 1; x is 0; and y is 4-8. In some embodiments, M is leucine-lysine and N is aspartic acid—isoleucine and Fc has at least 96% sequence identity to that of SEQ ID NO: 130; o, p, q, and z are each 1; x is 0; and y is 4-8. In some embodiments, M is leucine-lysine and N is aspartic acid—isoleucine and Fc has at least 97% sequence identity to that of SEQ ID NO: 130; o, p, q, and z are each 1; x is 0; and y is 4-8. In some embodiments, M is leucine-lysine and N is aspartic acid—isoleucine and Fc has at least 98% sequence identity to that of SEQ ID NO: 130; o, p, q, and z are each 1; x is 0; and y is 4-8. In some embodiments, M is leucine-lysine and N is aspartic acid—isoleucine and Fc has at least 99% sequence identity to that of SEQ ID NO: 130; o, p, q, and z are each 1; x is 0; and y is 4-8.

[0424] In some embodiments, M is leucine-lysine and N is aspartic acid—isoleucine and Fc comprises SEQ ID NO: 130; o, p, q, and z are each 1; x is 0; and y is 4-8. In some embodiments, M is leucine-lysine and N is aspartic acid—isoleucine and Fc comprises SEQ ID NO: 130; o, p, q, and z are each 1; x is 0; y is 4-8; and at least one of v or w is 0. In some embodiments, M is leucine-lysine and N is aspartic acid—isoleucine and Fc comprises SEQ ID NO: 130; o, p, q, and z are each 1; x is 0; y is 4-8; and at least one of v or w is 0; and [A] comprises at least 99% identity to any one of SEQ ID NOS: 12 and 33-43. In some embodiments, M is leucine-lysine and N is aspartic acid—isoleucine and Fc comprises SEQ ID NO: 130; o, p, q, and z are each 1; x is 0; y is 4-8; and at least one of v or w is 0; and [A] comprises any one of SEQ ID NOS: 12 and 33-43.

[0425] In some embodiments, M is leucine-lysine and N is aspartic acid—isoleucine; o, p, q, and z are each 1; x is 0; and y is 6. In some embodiments, M is leucine-lysine and N is aspartic acid—isoleucine and Fc has at least 90% sequence identity to that of SEQ ID NO: 130; o, p, q, and z are each 1; x is 0; and y is 6. In some embodiments, M is leucine-lysine and N is aspartic acid—isoleucine and Fc has at least 91% sequence identity to that of SEQ ID NO: 130; o, p, q, and z are each 1; x is 0; and y is 6. In some embodiments, M is leucine-lysine and N is aspartic acid—isoleucine and Fc has at least 92% sequence identity to that of SEQ ID NO: 130; o, p, q, and z are each 1; x is 0; and y is 6. In some embodiments, M is leucine-lysine and N is aspartic acid—isoleucine and Fc has at least 93% sequence identity to that of SEQ ID NO: 130; o, p, q, and z are each 1; x is 0; and y is 6. In some embodiments, M is leucine-lysine and N is aspartic acid—isoleucine and Fc has at least 94% sequence identity to that of SEQ ID NO: 130; o, p, q, and z are each 1; x is 0; and y is 6. In some embodiments, M is leucine-lysine and N is aspartic acid—isoleucine and Fc has at least 95% sequence identity to that of SEQ ID NO: 130; o, p, q, and z are each 1; x is 0; and y is 6. In some embodiments, M is leucine-lysine and N is aspartic acid—isoleucine and Fc has at least 96% sequence identity to that of SEQ ID NO: 130; o, p, q, and z are each 1; x is 0; and y is 6. In some embodiments, M is leucine-lysine and N is aspartic acid—isoleucine and Fc has at least 97% sequence identity to that of SEQ ID NO: 130; o, p, q, and z are each 1; x is 0; and y is 6. In some embodiments, M is leucine-lysine and N is aspartic acid—isoleucine and Fc has at least 98% sequence identity to that of SEQ ID NO: 130; o, p, q, and z are each 1; x is 0; and y is 6. In some embodiments, M is leucine-lysine and N is aspartic acid—isoleucine and Fc has at least 99% sequence identity to that of SEQ ID NO: 130; o, p, q, and z are each 1; x is 0; and y is 6. In some embodiments, M is leucine-lysine and N is aspartic acid—isoleucine and Fc comprises SEQ ID NO: 130; o, p, q, and z are each 1; x is 0; and y is 6. In some embodiments, M is leucine-lysine and N is aspartic acid—isoleucine and Fc comprises SEQ ID NO: 130; o, p, q, and z are each 1; x is 0; y is 6; and the amino acid encoding the alkaline phosphatase comprises at least 99% identity to SEQ ID NO: 11. In some embodiments, M is leucine-lysine and N is aspartic acid—isoleucine and Fc comprises SEQ ID NO: 130; o, p, q, and z are each 1; x is 0; y is 6; and the amino acid encoding the alkaline phosphatase comprises SEQ ID NO: 11. In some embodiments, M is leucine-lysine and N is aspartic acid—isoleucine and Fc comprises SEQ ID NO: 130; o, p, q, and z are each 1; x is 0; y is 6; and the amino acid encoding the alkaline phosphatase comprises one or two amino acid substitutions as compared with SEQ ID NO: 11.

[0426] In some embodiments, D is an amino acid sequence comprising four amino acids. In some embodiments, each of the four amino acids is the same. In other embodiments, three of the four amino acids are the same. In yet other embodiments, two of the four amino acids are the same. In some embodiments, at least two contiguous amino acids of the four amino acids are the same. In other embodiments, at least three contiguous amino acids of the four amino acids are the same. In some embodiments, the four amino acids are selected from glycine, serine, threonine, alanine, lysine, and glutamic acid. In some embodiments, D comprises 4 amino acids, and x ranges from 1 to 6. In some embodiments, D comprises 4 amino acids, and x ranges from 1 to 4. In some embodiments, D comprises 4 amino acids, and x is 1 or 2. In some embodiments, D comprises 4 amino acids, and x is 2. In some embodiments, D comprises 4 amino acids and x is 1. In some embodiments, D comprises 4 amino acids, and x is 1 or 2, and q is 0. In some embodiments, D comprises 4 amino acids, and x is 2 and q is 0. In some embodiments, D comprises 4 amino acids and x is 1 and q is 0. In some embodiments, D comprises 4 amino acids and x is 1 and q is 1.

[0427] In some embodiments, D is GGGS. In other embodiments, D is GGSS. In yet other embodiments, D is GSSS. In further embodiments, D is GSGS. In some embodiments, D is GGGS and x is an integer ranging from 1 to 4. In some embodiments, D is GGGS and x is an integer ranging from 1 to 3. In some embodiments, D is GGGS and x is 1 or 2. In some embodiments, D is GGGS, x is an integer ranging from 1 to 4, and y is an integer ranging from 1 to 8. In some embodiments, D is GGGS, x is an integer ranging from 1 to 3, and y is an integer ranging from 1 to 8. In some embodiments, D is GGGS, x is 1 or 2, and y is an integer ranging from 1 to 8. In some embodiments, D is GGGS, x is 1 or 2, and y is an integer ranging from 1 to 8 and q is 0. In some embodiments, D is GGGS, x is 1 or 2, y is an integer ranging from 1 to 8 and q is 1. In some embodiments, D is GGGS, x is 1 or 2, y is an integer ranging from 1 to 8, q is 1, and R is (-[LK]-Fc-[DI]-). In some embodiments, D is GGGS, x is 2, y is an integer ranging from 1 to 8, q is 1, and R is (-[LK]-Fc-[DI]-). In some embodiments, D is GGGS, z is 1, x is 2, y is an integer ranging from 1 to 8, q is 1, and R is (-[LK]-Fc-[DI]-).

[0428] In some embodiments, D is GGGS or GGSS, and wherein x is an integer ranging from 1 to 3, E is -D-S-S-, and wherein y is an integer ranging from between 1 and 8. In some embodiments, D is GGGS or GGSS, and wherein x is 1 or 2, E is -D-S-S-, and wherein y is an integer ranging from between 1 and 8. In some embodiments, D is GGGS or GGSS, and wherein x is an integer ranging from 1 to 3, E is aspartic acid, and wherein y is an integer ranging from between 8 and 12. In some embodiments, D is GGGS or GGSS, and wherein x is 1 or 2, E is aspartic acid, and wherein y is 10. In some embodiments, D is GGGS or GGSS, and wherein x is 2, E is aspartic acid, and wherein y is 10. In some embodiments, D is GGGS, and wherein x is 2, E is aspartic acid, and wherein y is an integer ranging from 4 to 16. In some embodiments, D is GGGS, and wherein x is 2, E is aspartic acid, and wherein y is an integer ranging from 4 to 12. In some embodiments, D is GGGS, and wherein x is 2, E is aspartic acid, and wherein y is 10. In some embodiments, D is GGGS, and wherein x is 2, E is aspartic acid, and wherein y is 10 and q is 0. In some embodiments, D is GGGS, and wherein x is 2, E is aspartic acid, wherein y is 10 and q is 1. In some embodiments, D is GGGS, x is 2, E is aspartic acid, wherein y is 10 and q is 1, and R is (-[LK]-Fc-[DI]-).

[0429] In some embodiments, D is an amino acid sequence comprising five amino acids. In some embodiments, each of the five amino acids is the same. In some embodiments, four of the five amino acids are the same. In other embodiments, three of the five amino acids are the same. In other embodiments, two of the five amino acids are the same. In some embodiments, at least two contiguous amino acids of the five amino acids are the same. In other embodiments, at least three contiguous amino acids of the five amino acids are the same. In yet other embodiments, four contiguous amino acids of the five amino acids are the same. In some embodiments, the five amino acids are selected from glycine, serine, threonine, alanine, lysine, and glutamic acid. In some embodiments, D comprises 5 amino acids, and x ranges from 1 to 6. In some embodiments, D comprises 5 amino acids, and x ranges from 1 to 4. In some embodiments, D comprises 5 amino acids, and x is 1 or 2. In some embodiments, D comprises 5 amino acids and x is 1. In some embodiments, D comprises 5 amino acids and x is 1 and q is 0. In some embodiments, D comprises 5 amino acids, x is 1, and q is 1. In some embodiments, D comprises 5 amino acids, x is 1, and q is 1 and R is (-[LK]-Fc-[DI]-).

[0430] In some embodiments, D is GGGGS. In other embodiments, D is GGGSS. In yet other embodiments, D is GGSSS. In further embodiments, D is GGSGS. In even further embodiments, D is GGSGS. In some embodiments, D is GGGGS or GGGSS, and wherein x is an integer ranging from 1 to 4. In some embodiments, D is GGGGS or GGGSS, and wherein x is an integer ranging from 1 to 3. In some embodiments, D is GGGGS or GGGSS, and wherein x is 1 or 2. In some embodiments, D is GGGGS or GGGSS, and wherein x is an integer ranging from 1 to 4, and wherein y is an integer ranging from between 1 and 8. In some embodiments, D is GGGGS or GGGSS, and wherein x is an integer ranging from 1 to 3 and wherein y is an integer ranging from between 1 and 8. In some embodiments, D is GGGGS or GGGSS, and wherein x is 1 or 2, and wherein y is an integer ranging from between 1 and 8.

[0431] In some embodiments, D is GGGGS or GGGSS, and wherein x is an integer ranging from 1 to 3, E is -D-S-S-, and wherein y is an integer ranging from between 1 and 8. In some embodiments, D is GGGGS or GGGSS, and wherein x is 1 or 2, E is -D-S-S-, and wherein y is an integer ranging from between 1 and 8. In some embodiments, D is GGGGS or GGGSS, and wherein x is an integer ranging from 1 to 3, E is aspartic acid, and wherein y is an integer ranging from between 8 and 12. In some embodiments, D is GGGGS or GGGSS, and wherein x is 1 or 2, E is aspartic acid, and wherein y is 10. In some embodiments, D is GGGGS, and wherein x is 1 or 2, E is aspartic acid, and wherein y ranges from 4 to 16. In some embodiments, D is GGGGS, and wherein x is 1 or 2, E is aspartic acid, and wherein y ranges from 8 to 12. In some embodiments, D is GGGGS, and wherein x is 1 or 2, E is aspartic acid, and wherein y is 10. In some embodiments, D is GGGGS, and wherein x is 1 or 2, E is aspartic acid, and wherein y is 10 and q is 0. In some embodiments, D is GGGGS, and wherein x is 1 or 2, E is aspartic acid, and wherein y is 10 and q is 1. In some embodiments, D is GGGGS, and wherein x is 1 or 2, E is aspartic acid, and wherein y is 10 and q is 1 and R is (-[LK]-Fc-[DI]-).

[0432] In some embodiments, D is EAAAK. In some embodiments, D is EAAAK, and wherein x is an integer ranging from 2 to 5. In other embodiments, D is EAAAK, wherein x is an integer ranging from 1 to 4. In yet other embodiments, D is EAAAK, wherein x is an integer ranging from 1 to 3. In further embodiments, D is EAAAK, wherein x is 1 or 2.

[0433] In some embodiments, D is F(G)ₜF, where each F is the same amino acid, G is an amino acid sequence having 3, 4, or 5 amino acids, and t is an integer ranging from 2-5. In some embodiments, each F is alanine. In some embodiments, G is EAAAK. In some embodiments, each F is alanine, G is EAAAK, and t is 2 or 3. In some embodiments, each F is alanine, G is EAAAK, t is 2 or 2, and x is 1 or 2. In some embodiments, D is an amino acid sequence comprising six amino acids. In some embodiments, each of the six amino acids is the same. In some embodiments, five of the six amino acids are the same. In some embodiments, four of the six amino acids are the same. In other embodiments, three of the six amino acids are the same. In yet other embodiments, two of the six amino acids are the same. In some embodiments, at least two contiguous amino acids of the six amino acids are the same. In other embodiments, at least three contiguous amino acids of the six amino acids are the same. In yet other embodiments, four contiguous amino acids of the six amino acids are the same. In yet further embodiments, five contiguous amino acids of the six amino acids are the same. In some embodiments, the six amino acids are selected from glycine, serine, threonine, alanine, lysine, and glutamic acid. In some embodiments, D comprises 6 amino acids, and x ranges from 1 to 6. In some embodiments, D comprises 6 amino acids, and x ranges from 1 to 4. In some embodiments, D comprises 6 amino acids, and x is 1 or 2. In some embodiments, D comprises 6 amino acids and x is 1. In some embodiments, D comprises 6 amino acids, and x is 1 or 2 and q is 0. In some embodiments, D comprises 6 amino acids and x is 1 and q is 0. In some embodiments, D comprises 6 amino acids and x is 1 and q is 1. In some embodiments, D comprises 6 amino acids and x is 1 and q is 1 and R is (-[LK]-Fc-[DI]-).

[0434] In some embodiments, D is GGGGGS. In other embodiments, D is GGGGSS. In yet other embodiments, D is GGGSSS. In further embodiments, D is GGGSGS. In even further embodiments, D is GGSGGS. In yet even further embodiments, D is GGGSGS.

[0435] In some embodiments, D is R-GGGGS or R-GGGSS, where R is an amino acid selected from glycine, serine, threonine, alanine, lysine, and glutamic acid and wherein x is an integer ranging from 1 to 4. In some embodiments, D is GGGGS or GGGSS, where R is an amino acid selected from glycine, serine, threonine, alanine, lysine, and glutamic acid, and wherein x is an integer ranging from 1 to 3. In some embodiments, D is GGGGS or GGGSS, where R is an amino acid selected from glycine, serine, threonine, alanine, lysine, and glutamic acid, and wherein x is 1 or 2. In some embodiments, D is GGGGS or GGGSS, where R is an amino acid selected from glycine, serine, threonine, alanine, lysine, and glutamic acid, and wherein x is an integer ranging from 1 to 4, and wherein y is an integer ranging from between 1 and 8. In some embodiments, D is GGGGS or GGGSS, where R is an amino acid selected from glycine, serine, threonine, alanine, lysine, and glutamic acid, and wherein x is an integer ranging from 1 to 3 and wherein y is an integer ranging from between 1 and 8. In some embodiments, D is GGGGS or GGGSS, where R is an amino acid selected from glycine, serine, threonine, alanine, lysine, and glutamic acid, and wherein x is 1 or 2, and wherein y is an integer ranging from between 1 and 8.

[0436] In some embodiments, D is R-GGGGS or R-GGGSS, where R is an amino acid selected from glycine, serine, threonine, alanine, lysine, and glutamic acid, and wherein x is an integer ranging from 1 to 3, E is -D-S-S-, and wherein y is an integer ranging from between 1 and 8. In some embodiments, D is GGGGS or GGGSS, where R is an amino acid selected from glycine, serine, threonine, alanine, lysine, and glutamic acid, and wherein x is 1 or 2, E is -D-S-S-, and wherein y is an integer ranging from between 1 and 8. In some embodiments, D is GGGGS or GGGSS, where R is an amino acid selected from glycine, serine, threonine, alanine, lysine, and glutamic acid, and wherein x is an integer ranging from 1 to 3, E is aspartic acid and wherein y is an integer ranging from between 8 and 12. In some embodiments, D is GGGGS or GGGSS, where R is an amino acid selected from glycine, serine, threonine, alanine, lysine, and glutamic acid, and wherein x is 1 or 2, E is aspartic acid, and wherein y is 10.

[0437] In some embodiments, E comprises 1 amino acid. In some embodiments, the 1 amino acid is selected from aspartic acid, serine, lysine, threonine, tyrosine, alanine, methionine, valine, tryptophan, proline, arginine, glutamine. In other embodiments, the 1 amino acid is selected from aspartic acid and serine. In some embodiments, E comprises 1 amino acid, and y ranges from 1 to 16. In some embodiments, E comprises 1 amino acid, and y ranges from 4 to 16. In some embodiments, E comprises 1 amino acid, and y ranges from 2 to 12. In some embodiments, E comprises 1 amino acid, and y ranges from 2 to 10. In some embodiments, E comprises 1 amino acid, and y ranges from 4 to 12. In some embodiments, E comprises 1 amino acid, and y is 10.

[0438] In some embodiments, E is aspartic acid, and y ranges from 1 to 16. In some embodiments, E is aspartic acid, and y ranges from 4 to 12. In some embodiments, E is aspartic acid and y is 10. In some embodiments, E is aspartic acid, v+w is 1, and y ranges from 1 to 16. In some embodiments, E is aspartic acid, v+w is 1, and y ranges from 4 to 12. In some embodiments, E is aspartic acid, v+w is 1, and y is 10. In some embodiments, E is aspartic acid, v+w is 1, x is 0, and y ranges from 1 to 16. In some embodiments, E is aspartic acid, v+w is 1, x is 0, and y ranges from 4 to 12. In some embodiments, E is aspartic acid, v+w is 1, x is 0, and y is 10. In some embodiments, E is aspartic acid, v+w is 1, x is 0, and y is 10 and q is 1.

[0439] In some embodiments, E is aspartic acid, v+w is 1, x is 0, and y is 10 and q is 0. In some embodiments, E is aspartic acid, v+w is 1, x is 0, and y is greater than 16 and q is 1. In some embodiments, E is aspartic acid, v+w is 1, x is 0, and y is less than 10 and q is 1.

[0440] In some embodiments, E comprises 2 amino acids. In some embodiments, the 2 amino acids are selected from aspartic acid, serine, lysine, threonine, tyrosine, alanine, methionine, valine, tryptophan, proline, arginine, glutamine. In other embodiments, the 2 amino acid is selected from aspartic acid and serine. In some embodiments, E is -D-S-. In other embodiments, E is -D-D-. In some embodiments, E comprises 2 amino acids, and y ranges from 1 to 16. In some embodiments, E comprises 2 amino acids, and y ranges from 1 to 12. In some embodiments, E comprises 2 amino acids, and y ranges from 1 to 10. In some embodiments, E comprises 2 amino acids, and y ranges from 1 to 8. In some embodiments, E comprises 2 amino acids, and y ranges from 1 to 6. In some embodiments, E comprises 2 amino acids, and y ranges from 1 to 4. In some embodiments, E comprises 2 amino acids, and y is 1 or 2. In some embodiments, E comprises 2 amino acids, and y ranges from 2 to 12. In some embodiments, E comprises 2 amino acids, and y ranges from 2 to 10. In some embodiments, E comprises 2 amino acids, and y ranges from 2 to 8. In some embodiments, E comprises 2 amino acids, and y ranges from 2 to 8 and q is 0.

[0441] In some embodiments, E is -D-D- or -D-S-, and y ranges from 1 to 16. In some embodiments, E is -D-D- or -D-S-, and y ranges from 1 to 12. In some embodiments, E is -D-D- or -D-S-, and y ranges from 1 to 10. In some embodiments, E is aspartic acid, and y ranges from 1 to 8. In some embodiments, E is -D-D- or -D-S-, and y is 10. In some embodiments, E is -D-D- or -D-S-, v+w is 1, and y ranges from 1 to 16. In some embodiments, E is -D-D- or -D-S-, y ranges from 1 to 12. In some embodiments, E is -D-D- or -D-S-, v+w is 1, and y ranges from 1 to 10. In some embodiments, E is -D-D- or -D-S-, v+w is 1, and y ranges from 1 to 8. In some embodiments, E is -D-D- or -D-S-, v+w is 1, x is 0, and y ranges from 1 to 16. In some embodiments, E is -D-D- or -D-S-, v+w is 1, x is 0, and y ranges from 1 to 12. In some embodiments, E is -D-D- or -D-S-, v+w is 1, x is 0, and y ranges from 1 to 10. In some embodiments, E is -D-D- or -D-S-, v+w is 1, x is 0, and y ranges from 1 to 8. In some embodiments, E is -D-D- or -D-S-, v+w is 1, x is 0, y ranges from 1 to 8, and z is 1.

[0442] In some embodiments, E is -D-D- or -D-S-, v+w is 1, x is 0, y ranges from 1 to 8, and q is 0. In some embodiments, E is -D-D- or -D-S-, v+w is 1, x is 0, y ranges from 1 to 8, q is 0, and z is 1.

[0443] In some embodiments, E comprises 3 amino acids. In some embodiments, the 3 amino acids are selected from aspartic acid, serine, lysine, threonine, tyrosine, alanine, methionine, valine, tryptophan, proline, arginine, glutamine. In other embodiments, the 3 amino acid is selected from aspartic acid and serine. In some embodiments, E is -D-S-S-. In other embodiments, E is -D-D-S-. In other embodiments, E is -D-D-D. In other embodiments, E is -D-S-S-.

[0444] In some embodiments, E comprises 3 amino acids, and y ranges from 1 to 16. In some embodiments, E comprises 3 amino acids, and y ranges from 1 to 12. In some embodiments, E comprises 3 amino acids, and y ranges from 2 to 12. In some embodiments, E comprises 3 amino acids, and y ranges from 1 to 10. In some embodiments, E comprises 3 amino acids, and y ranges from 2 to 10. In some embodiments, E comprises 3 amino acids, and y ranges from 1 to 8. In some embodiments, E comprises 3 amino acids, and y ranges from 2 to 8. In some embodiments, E comprises 3 amino acids, and y ranges from 1 to 6. In some embodiments, E comprises 3 amino acids, and y ranges from 3 to 6. In some embodiments, E comprises 3 amino acids, and y ranges from 3 to 6 and q is 0.

[0445] In some embodiments, E is -D-S-S-, and y ranges from 1 to 16. In some embodiments, E is -D-S-S-, and y ranges from 1 to 12. In some embodiments, E is -D-S-S-, and y ranges from 1 to 10. In some embodiments, E is aspartic acid, and y ranges from 1 to 8. In some embodiments, E is -D-S-S-, and y is 6, i.e. [E]_{y} is [-DSS-]₆. In other embodiments, E is -D-S-S-, y is 6 and z is 1. In some embodiments, E is -D-S-S-, y is 6 and q is 0. In other embodiments, E is -D-S-S-, y is 6, z is 1, and q is 0. In other embodiments, E is -D-S-S-, y is 6, z is 1, q is 0, and x is 0. In other embodiments, E is -D-S-S-, y is 6, z is 1, q is 0, and x is 2.

[0446] In some embodiments, E is -D-S-S-, y is 6 and q is 1. In other embodiments, E is -D-S-S-, y is 6, z is 1, and q is 1. In other embodiments, E is -D-S-S-, y is 6, z is 1, x is 0, and q is 1. In other embodiments, E is -D-S-S-, y is 6, z is 1, x is 2, and q is 1.

[0447] In some embodiments, E is -D-S-S-, y is 6, q is 1, and R is (-[LK]-Fc-[DI]-). In some embodiments, E is -D-S-S-, y is 6, q is 1, R is (-[LK]-Fc-[DI]-), and [A] has at least 99% identity to any one of SEQ ID NOS: 12 and 33-43. In some embodiments, E is -D-S-S-, y is 6,
[0448] q is 1, R is (-[LK]-Fc-[DI]-), and [A] has identity to any one of SEQ ID NOS: 12 and 33-43. In some embodiments, E is -D-S-S-, y is 6, q is 1, R is (-[LK]-Fc-[DI]-), [A] has at least 99% identity to any one of SEQ ID NOS: 12 and 33-43; and [B] comprises at least 99% identity to that of SEQ ID NO: 11. In some embodiments, E is -D-S-S-, y is 6, q is 1, R is (-[LK]-Fc-[DI]-), [A] has at least 99% identity to any one of SEQ ID NOS: 12 and 33-43; and [B] comprises SEQ ID NO: 11.

[0449] In some embodiments, E is -D-S-S-, v+w is 1, and y ranges from 1 to 16. In some embodiments, E is -D-S-S-, y ranges from 1 to 12. In some embodiments, E is -D-S-S-, v+w is 1, and y ranges from 1 to 10. In some embodiments, E is -D-S-S-, v+w is 1, and y ranges from 1 to 8. In some embodiments, E is -D-S-S-, v+w is 1, and y is 6. In some embodiments, E is -D-S-S-, v+w is 1, x is 0, and y ranges from 1 to 16. In some embodiments, E is -D-S-S-, v+w is 1, x is 0, and y ranges from 1 to 12. In some embodiments, E is -D-S-S-, v+w is 1, x is 0, and y ranges from 1 to 10. In some embodiments, E is -D-S-S-, v+w is 1, x is 0, and y ranges from 1 to 8. In some embodiments, E is -D-S-S-, v+w is 1, x is 0, and y is 6. In some embodiments, E is -D-S-S-, v+w is 1, x is 0, and y is 6 and q is 0. In some embodiments, E is -D-S-S-, v+w is 1, x is 0, and y is 6. In some embodiments, E is -D-S-S-, v+w is 1, x is 0, and y is 6 and q is 1. In some embodiments, E is -D-S-S-, v+w is 1, x is 0, and y is 6. In some embodiments, E is -D-S-S-, v+w is 1, x is 0, y is 6, q is 1, and R is (-[LK]-Fc-[DI]-). In some embodiments, E is -D-S-S-, v+w is 1, x is 0, y is 6, q is 1, R is (-[LK]-Fc-[DI]-), and [A] has at least 99% identity to any one of SEQ ID NOS: 12 and 33-43. In some embodiments, E is -D-S-S-, v+w is 1, x is 0, y is 6, q is 1, R is (-[LK]-Fc-[DI]-), and [A] comprises any one of SEQ ID NOS: 12 and 33-43. In some embodiments the polypeptide is not conjugated to a dextran.

[0450] In some embodiments, E comprises 4 amino acids. In some embodiments, the 4 amino acids are selected from aspartic acid, serine, lysine, threonine, tyrosine, alanine, methionine, valine, tryptophan, proline, arginine, glutamine. In other embodiments, the 4 amino acid is selected from aspartic acid and serine. In some embodiments, E is DDSS. In other embodiments, E is -D-D-D-S-. In other embodiments, E is DDDD. In other embodiments, E is DDSS. In other embodiments, E is -D-S-S-S-. In some embodiments, E comprises 4 amino acids, and y ranges from 1 to 16. In some embodiments, E comprises 4 amino acids, and y ranges from 1 to 12. In some embodiments, E comprises 4 amino acids, and y ranges from 1 to 10. In some embodiments, E comprises 4 amino acids, and y ranges from 1 to 8. In some embodiments, E comprises 4 amino acids, and y ranges from 1 to 6. In some embodiments, E comprises 4 amino acids, and y ranges from 1 to 4. In some embodiments, E comprises 4 amino acids, and y is 1 or 2. In some embodiments, E comprises 4 amino acids, and y ranges from 2 to 12. In some embodiments, E comprises 4 amino acids, and y ranges from 2 to 10. In some embodiments, E comprises 4 amino acids, and y ranges from 2 to 8. In some embodiments, E comprises 4 amino acids, and y ranges from 2 to 8 and q is 0. In some embodiments, E comprises 4 amino acids, and y ranges from 2 to 8. In some embodiments, E comprises 4 amino acids, and y ranges from 2 to 8 and q is 1.

[0451] In some embodiments, E is -D-D-S-S-, and y ranges from 1 to 16. In some embodiments, E is -D-D-S-S-, and y ranges from 1 to 12. In some embodiments, E is -D-D-S-S-, and y ranges from 1 to 10. In some embodiments, E is aspartic acid, and y ranges from 1 to 8. In some embodiments, E is -D-D-S-S-, and y is 10. In some embodiments, E is -D-D-S-S-, v+w is 1, and y ranges from 1 to 16. In some embodiments, E is -D-D-S-S-, y ranges from 1 to 12. In some embodiments, E is -D-D-S-S-, v+w is 1, and y ranges from 1 to 10. In some embodiments, E is -D-D-S-S-, v+w is 1, and y ranges from 1 to 8. In some embodiments, E is -D-D-S-S-, v+w is 1, x is 0, and y ranges from 1 to 16. In some embodiments, E is -D-D-S-S-, v+w is 1, x is 0, and y ranges from 1 to 12. In some embodiments, E is -D-D-S-S-, v+w is 1, x is 0, and y ranges from 1 to 10. In some embodiments, E is -D-D-S-S-, v+w is 1, x is 0, and y ranges from 1 to 8. In some embodiments, E is -D-D-S-S-, v+w is 1, x is 0, and y ranges from 1 to 8 and q is 0. In some embodiments, E is -D-D-S-S-, v+w is 1, x is 0, and y ranges from 1 to 8 and q is 1.

[0452] In some embodiments, E comprises 5 or more amino acids. In some embodiments, the 5 or more amino acids are selected from aspartic acid, serine, lysine, threonine, tyrosine, alanine, methionine, valine, tryptophan, proline, arginine, glutamine. In other embodiments, the 5 or more amino acid is selected from aspartic acid and serine. In other embodiments, E comprises 5 amino acids. For example, E may be DDS SD or DDS SD. In other embodiments, E comprises 6 amino acids. For example, E may be -D-D-S-S-D-D-. In other embodiments, E comprises 7 amino acids. For example, E may be -S-D-D-S-S-D-D-. By way of another example, E may be KRRTPVR. By way of yet another example, E may be KNFQSRS. By way of a further example, E may be KTYASMQ. In other embodiments, E comprises 8 amino acids.

[0453] For example, E may be -S-D-D-S-S-D-D-S-. By way of another example, E may be KRRTPVRE. By way of yet another example, E may be KNFQSRSH. By way of a further example, E may be KTYASMQW.

[0454] In some embodiments, q is 0. In some embodiments, q is 0, and x is at least 1. In other embodiments, q is 0 and y is at least 4. In other embodiments, q is 0 and y is 6.

[0455] In yet other embodiments, q is 1 and y is at least 4. In yet other embodiments, q is 1 and y is 6. In some embodiments, q is 1, y is 6, and R is (-[LK]-Fc-[DI]-). In some embodiments, q is 1, y is 6, w is 0, and R is (-[LK]-Fc-[DI]-). In some embodiments, q is 1, y is 6, w is 0, x is 0, and R is (-[LK]-Fc-[DI]-). In some embodiments, q is 1, z is 1, y is 6, w is 0, x is 0, and R is (-[LK]-Fc-[DI]-). In some embodiments, q is 1, z is 1, y is 6, w is 0, x is 0, and R is (-[LK]-Fc-[DI]-), where Fc comprises at least 99% identity to that of SEQ ID NO: 11. In some embodiments, q is 1, z is 1, y is 6, w is 0, x is 0, and R is (-[LK]-Fc-[DI]-), where Fc comprises one amino acid substitution compared to that of SEQ ID NO: 11. In some embodiments, q is 1, z is 1, y is 6, w is 0, x is 0, and R is (-[LK]-Fc-[DI]-), where Fc comprises SEQ ID NO: 11. In some embodiments, q is 1, z is 1, y is 6, w is 0, x is 0, and R is (-[LK]-Fc-[DI]-), where Fc comprises SEQ ID NO: 11; and where [A] comprises at least 99% identity to any one of SEQ ID NOS: 12 and 33-43. In some embodiments, q is 1, z is 1, y is 6, w is 0, x is 0, and R is (-[LK]-Fc-[DI]-), where Fc comprises SEQ ID NO: 11; and where [A] comprises any one of SEQ ID NOS: 12 and 33-43. In some embodiments, the polypeptide has less than 99% identity to SEQ ID NO: 1. In some embodiments, the polypeptide has less than 98% identity to SEQ IF NO: 1. In some embodiments, the polypeptide is not conjugated to a dextran.

[0456] In some embodiments, z is an integer ranging from 1 to 6. In other embodiments, z is an integer ranging from 1 to 4. In yet other embodiments, z is an integer ranging from 1 to 3. In further embodiments, z is 1 or 2. In even further embodiments, z is 1. In even further embodiments, z is 1; and q is 0 and y is 6. In even further embodiments, z is 1; and q is 1 and y is 6.

[0457] In some embodiments, the present disclosure provides for a polypeptide having Formula (IB):

[A]ᵥ-[B]-[C]_{w}-[R]_{q}-([D]ₓ-[E]_{y})_{z}, (IB)
[0458] wherein
[0459] A comprises an amino acid sequence encoding a secretion signal peptide;
[0460] B comprises an amino acid encoding an alkaline phosphatase;
[0461] C comprises an amino acid sequence encoding a GPI anchor;
[0462] R is -(Mₒ(Fc)Nₚ)-, where M and N each independently include between 1 and 6 amino acids, where Fc is a Fc domain, and o and p are each independently 0, 1, or 2;
[0463] D comprises an amino acid sequence having between 4 and 6 amino acids, or is F(G)ₜF, where each F is the same amino acid, G is an amino acid sequence having 3, 4, or 5 amino acids, and t is an integer ranging from 2-5;
[0464] E comprises an amino acid sequence having between 1 and 8 amino acids;
[0465] q is 0 or 1;
[0466] v is 0 or 1;
[0467] w is 0 or 1;
[0468] x is 0 or an integer ranging from 1 to 6;
[0469] y is 0 or an integer ranging from 1 to 16; and
[0470] z is 0 or an integer ranging from 1 to 6;
[0471] provided that when v is 1, w is 0, q is 1, o is 1, p is 1, N is the diamino acid -D-I-, M is the diamino acid -L-K-, [B] comprises SEQ ID NO: 11, Fc comprises SEQ ID NO: 130, and x is 0, then [E]_{y} does not comprise ten to sixteen contiguous aspartic acid residues.

[0472] In some embodiments, the polypeptide of Formula (IB) is not conjugated to a dextran.

[0473] In some embodiments, the polypeptide of Formula (IB) is catalytically competent to allow formation of hydroxyapatite crystals in bone.

[0474] In some embodiments, the present disclosure provides for a polypeptide having Formula (II):

[A]-[B]-[C]-[R]_{q}-([D]ₓ-[E]_{y}), (II)
[0475] wherein
[0476] A comprises an amino acid sequence encoding a secretion signal peptide;
[0477] B comprises an amino acid encoding an alkaline phosphatase;
[0478] C comprises an amino acid sequence encoding a GPI anchor;
[0479] R is -(Mₒ(Fc)Nₚ)-, where M and N each independently include between 1 and 6 amino acids, where Fc is a Fc domain, and o and p are each independently 0, 1, or 2;
[0480] D comprises an amino acid sequence having between 4 and 6 amino acids;
[0481] E comprises an amino acid sequence having between 1 and 8 amino acids;
[0482] q is 0 or 1;
[0483] x is 0 or an integer ranging from 1 to 6; and
[0484] y is 0 or an integer ranging from 1 to 16.

[0485] In some embodiments, the polypeptide of Formula (II) is catalytically competent to allow formation of hydroxyapatite crystals in bone.

[0486] In some embodiments, E comprises between 2 and 4 amino acids. In some embodiments, E comprises at least two different amino acids. In some embodiments, E comprises at least two different amino acids and wherein y ranges from 4-8.

[0487] In some embodiments, q is 0. In some embodiments, q is 1 and x is at least 1. In some embodiments, q is 1 and y is at least 1. In some embodiments, q is 1, and both x and 1 are at least 1.

[0488] In some embodiments, the amino acid encoding the alkaline phosphate is a tissue non-specific alkaline phosphatase. In some embodiments, the amino acid encoding the alkaline phosphatase has at least about 85% identity to SEQ ID NO: 11. In other embodiments, the amino acid encoding the alkaline phosphatase has at least about 90% identity to SEQ ID NO: 11. In yet other embodiments, the amino acid encoding the alkaline phosphatase has at least about 95% identity to SEQ ID NO: 11. In further embodiments, the amino acid encoding the alkaline phosphatase has at least about 96% identity to SEQ ID NO: 11. In even further embodiments, the amino acid encoding the alkaline phosphatase has at least about 97% identity to SEQ ID NO: 11. In yet even further embodiments, the amino acid encoding the alkaline phosphatase has at least about 98% identity to SEQ ID NO: 11. In yet even further embodiments, the amino acid encoding the alkaline phosphatase has at least about 99% identity to SEQ ID NO: 11. In some embodiments, the amino acid encoding the alkaline phosphatase comprises SEQ ID NO: 11.

[0489] In some embodiments, the amino acid encoding the alkaline phosphatase comprises a variant of SEQ ID NO: 11 comprising one or more amino acid substitutions. In some embodiments, the amino acid encoding the alkaline phosphatase comprises a variant of SEQ ID NO: 11 having a single amino acid substitution. For instance, a variant of SEQ ID NO: 11 may comprises a C102S substitution. By way of another example, a variant of SEQ ID NO: 11 may comprise an E434G substitution. By way of yet another example, a variant of SEQ ID NO: 11 may comprise an A321H substitution. In some embodiments, the amino acid encoding the alkaline phosphatase comprises a variant of SEQ ID NO: 11 having two amino acid substitutions. For instance, a variant of SEQ ID NO: 11 may comprise any two of a C102S substitution, an E434G substitution, or an A321H substitution, e.g. both an A321H substitution and an E434G substitution.

[0490] In some embodiments, the amino acid encoding the secretion signal peptide has at least 90% sequence identity to SEQ ID NO: 12. In other embodiments, the amino acid encoding the secretion signal peptide has at least 95% sequence identity to SEQ ID NO: 12. In yet other embodiments, the amino acid encoding the secretion signal peptide has at least 96% sequence identity to SEQ ID NO: 12. In further embodiments, the amino acid encoding the secretion signal peptide has at least 97% sequence identity to SEQ ID NO: 12. In yet further embodiments, the amino acid encoding the secretion signal peptide has at least 98% sequence identity to SEQ ID NO: 12. In even further embodiments, the amino acid encoding the secretion signal peptide has at least 99% sequence identity to SEQ ID NO: 12. In yet even further embodiments, the amino acid encoding the secretion signal peptide comprises SEQ ID NO: 12.

[0491] In some embodiments, the amino acid encoding the secretion signal peptide has at least 90% sequence identity to any one of SEQ ID NOS: 33-43. In other embodiments, the amino acid encoding the secretion signal peptide has at least 95% sequence identity to any one of SEQ ID NOS: 33-43. In yet other embodiments, the amino acid encoding the secretion signal peptide has at least 96% sequence identity to any one of SEQ ID NOS: 33-43. In further embodiments, the amino acid encoding the secretion signal peptide has at least 97% sequence identity to any one of SEQ ID NOS: 33-43. In yet further embodiments, the amino acid encoding the secretion signal peptide has at least 98% sequence identity to any one of SEQ ID NOS: 33-43. In even further embodiments, the amino acid encoding the secretion signal peptide has at least 99% sequence identity to any one of SEQ ID NOS: 33-43. In yet even further embodiments, the amino acid encoding the secretion signal peptide comprises any one of SEQ ID NOS: 33-43.

[0492] In some embodiments, the amino acid encoding the GPI anchor has at least 90% sequence identity to any one of SEQ ID NOS: 13 and 14. In other embodiments, the amino acid encoding the GPI anchor has at least 95% sequence identity to any one of SEQ ID NOS: 13 and 14. In yet other embodiments, the amino acid encoding the GPI anchor has at least 96% sequence identity to any one of SEQ ID NOS: 13 and 14. In further embodiments, the amino acid encoding the GPI anchor has at least 97% sequence identity to SEQ ID NOS: 13 and 14. In yet further embodiments, the amino acid encoding the GPI anchor has at least 98% sequence identity to any one of SEQ ID NOS: 13 and 14. In even further embodiments, the amino acid encoding the GPI anchor has at least 99% sequence identity to any one of SEQ ID NOS: 13 and 14. In yet even further embodiments, the amino acid encoding the GPI anchor comprises any one of SEQ ID NOS: 13 and 14.

[0493] In some embodiments, the amino acid encoding the alkaline phosphatase has at least about 90% identity to SEQ ID NO: 11, and x+y=8 to 12. In some embodiments, the amino acid encoding the alkaline phosphatase has at least about 95% identity to SEQ ID NO: 11, and x+y=8 to 12. In some embodiments, the amino acid encoding the alkaline phosphatase has at least about 96% identity to SEQ ID NO: 11, and x+y=8 to 12. In some embodiments, the amino acid encoding the alkaline phosphatase has at least about 97% identity to SEQ ID NO: 11, and x+y=8 to 12. In some embodiments, the amino acid encoding the alkaline phosphatase has at least about 98% identity to SEQ ID NO: 11, and x+y=8 to 12. In some embodiments, the amino acid encoding the alkaline phosphatase has at least about 99% identity to SEQ ID NO: 11, and x+y=8 to 12. In some embodiments, the amino acid encoding the alkaline phosphatase comprises SEQ ID NO: 11, and x+y=8 to 12. In some embodiments, the amino acid encoding the alkaline phosphatase comprises SEQ ID NO: 11, and x+y=8 to 12.

[0494] In some embodiments, the amino acid encoding the alkaline phosphatase comprises SEQ ID NO: 11, and x+y=8 to 12, and q is 1. In some embodiments, the amino acid encoding the alkaline phosphatase comprises SEQ ID NO: 11, and x+y=8 to 12, q is 1; and R is (-[LK]-Fc-[DI]-). In some embodiments, the amino acid encoding the alkaline phosphatase comprises SEQ ID NO: 11, and x+y=8 to 12, q is 1; and R is (-[LK]-Fc-[DI]-), and [A] comprises an amino acid sequence having at least 95% identity to any one of SEQ ID NOS: 12 and 33-43. In some embodiments, the amino acid encoding the alkaline phosphatase comprises SEQ ID NO: 11, and x+y=8 to 12, q is 1; and R is (-[LK]-Fc-[DI]-), and [A] comprises an amino acid sequence having at least 96% identity to any one of SEQ ID NOS: 12 and 33-43. In some embodiments, the amino acid encoding the alkaline phosphatase comprises SEQ ID NO: 11, and x+y=8 to 12, q is 1; and R is (-[LK]-Fc-[DI]-), and [A] comprises an amino acid sequence having at least 97% identity to any one of SEQ ID NOS: 12 and 33-43. In some embodiments, the amino acid encoding the alkaline phosphatase comprises SEQ ID NO: 11, and x+y=8 to 12, q is 1; and R is (-[LK]-Fc-[DI]-), and [A] comprises an amino acid sequence having at least 98% identity to any one of SEQ ID NOS: 12 and 33-43. In some embodiments, the amino acid encoding the alkaline phosphatase comprises SEQ ID NO: 11, and x+y=8 to 12, q is 1; and R is (-[LK]-Fc-[DI]-), and [A] comprises an amino acid sequence having at least 99% identity to any one of SEQ ID NOS: 12 and 33-43. In some embodiments, the amino acid encoding the alkaline phosphatase comprises SEQ ID NO: 11, and x+y=8 to 12, q is 1; and R is (-[LK]-Fc-[DI]-), and [A] comprises an amino acid sequence having any one of SEQ ID NOS: 12 and 33-43.

[0495] In some embodiments, the amino acid encoding the alkaline phosphatase has at least about 90% identity to SEQ ID NO: 11, and x+y=4 to 8. In some embodiments, the amino acid encoding the alkaline phosphatase has at least about 95% identity to SEQ ID NO: 11, and x+y=4 to 8. In some embodiments, the amino acid encoding the alkaline phosphatase has at least about 96% identity to SEQ ID NO: 11, and wherein x+y=4 to 8. In some embodiments, the amino acid encoding the alkaline phosphatase has at least about 97% identity to SEQ ID NO: 11, and x+y=4 to 8. In some embodiments, the amino acid encoding the alkaline phosphatase has at least about 98% identity to SEQ ID NO: 11, and x+y=4 to 8. In some embodiments, the amino acid encoding the alkaline phosphatase has at least about 99% identity to SEQ ID NO: 11, and x+y=4 to 8. In some embodiments, the amino acid encoding the alkaline phosphatase comprises SEQ ID NO: 11, and x+y=4 to 8.

[0496] In some embodiments, D is GGGGS. In other embodiments, D is GGGSS. In yet other embodiments, D is GGSSS. In further embodiments, D is GGSGS. In even further embodiments, D is GGSGS.

[0497] In some embodiments, D is GGGGS or GGGSS, and x is an integer ranging from 1 to 4. In some embodiments, D is GGGGS or GGGSS, and x is an integer ranging from 1 to 3. In some embodiments, D is GGGGS or GGGSS, and x is 1 or 2. In some embodiments, D is GGGGS or GGGSS, and x is 2. In some embodiments, D is GGGGS, and x is 2. In some embodiments, D is GGGGS, and x is 2 and q is 0.

[0498] In some embodiments, D is GGGGS or GGGSS, and x is an integer ranging from 1 to 4, and y is an integer ranging from between 4 and 12. In some embodiments, D is GGGGS or GGGSS, x is an integer ranging from 1 to 3 and y is an integer ranging from between 4 and 12. In some embodiments, D is GGGGS or GGGSS, x is 1 or 2, and y is an integer ranging from between 4 and 12. In some embodiments, D is GGGGS or GGGSS, x is 1 or 2, and y is an integer ranging from between 4 and 12 and q is 0.

[0499] In some embodiments, E comprises 1 amino acid. In some embodiments, the 1 amino acid is selected from aspartic acid and serine. In some embodiments, E comprises 1 amino acid, and y ranges from 1 to 16. In some embodiments, E comprises 1 amino acid, and y ranges from 4 to 16. In some embodiments, E comprises 1 amino acid, and y ranges from 4 to 12. In some embodiments, E comprises 1 amino acid, and y ranges from 6 to 12. In some embodiments, E comprises 1 amino acid, and y ranges from 8 to 10. In some embodiments, E comprises 1 amino acid, and y is 10. In some embodiments, E comprises 1 amino acid, and y is 10, and wherein q is 0.

[0500] In some embodiments, E is aspartic acid, and y ranges from 1 to 16. In some embodiments, E is aspartic acid, and y ranges from 4 to 16. In some embodiments, E is aspartic acid, and y ranges from 4 to 12. In some embodiments, E is aspartic acid, and y ranges from 6 to 12. In some embodiments, E is aspartic acid and y is 10. In some embodiments, E is aspartic acid and y is 10 and q is 0.

[0501] In some embodiments, E comprises 3 amino acids. In some embodiments, the 3 amino acids are selected from aspartic acid and serine. In some embodiments, E is -D-S-S-. In other embodiments, E is -D-D-S-. In other embodiments, E is -D-D-D-. In some embodiments, E comprises 3 amino acids, and y ranges from 1 to 16. In some embodiments, E comprises 3 amino acids, and y ranges from 1 to 12. In some embodiments, E comprises 3 amino acids, and y ranges from 1 to 10. In some embodiments, E comprises 3 amino acids, and y ranges from 1 to 8. In some embodiments, E comprises 3 amino acids, and y ranges from 4 to 8. In some embodiments, E comprises 3 amino acids, and y is 6. In some embodiments, E comprises 3 amino acids, and y ranges from 4 to 8. In some embodiments, E comprises 3 amino acids, and y is 6 and q is 0.

[0502] In some embodiments, E is -D-S-S-, and y ranges from 1 to 16. In some embodiments, E is -D-S-S-, and y ranges from 1 to 12. In some embodiments, E is -D-S-S-, and y ranges from 1 to 10. In some embodiments, E is -D-S-S-, and y ranges from 4 to 8. In some embodiments, E is aspartic acid, and y ranges from 1 to 8. In some embodiments, E is -D-S-S-, and y is 6. In some embodiments, E is -D-S-S-, and y is 6 and q is 0.

[0503] In some embodiments, D is GGGGS or GGGSS, x is an integer ranging from 1 to 3, E is -D-S-S-, and y is an integer ranging from between 1 and 8. In some embodiments, D is GGGGS or GGGSS, x is 1 or 2, E is -D-S-S-, and y is an integer ranging from between 1 and 8. In some embodiments, D is GGGGS or GGGSS, x is 1 or 2, E is -D-S-S-, and y is an integer ranging from between 4 and 8. In some embodiments, D is GGGGS or GGGSS, x is 1 or 2, E is -D-S-S-, and y is 6. In some embodiments, D is GGGGS, x is 1 or 2, E is -D-S-S-, and y is 6. In some embodiments, D is GGGGS, x is 1 or 2, E is -D-S-S-, and y is 6 and q is 0.

[0504] In some embodiments, D is GGGGS or GGGSS, x is an integer ranging from 1 to 3, E is aspartic acid, and y is an integer ranging from between 8 and 12. In some embodiments, D is GGGGS or GGGSS, x is 1 or 2, E is aspartic acid, and y is 10. In some embodiments, D is GGGGS or GGGSS, x is 2, E is aspartic acid, and y is 10. In some embodiments, D is GGGGS, x is 2, E is aspartic acid, and y is 10. In some embodiments, D is GGGGS, x is 2, E is aspartic acid, and y is 10 and q is 0.

[0505] In some embodiments, E is KRRTPVRE. In other embodiments, E is KNFQSRSH. In yet other embodiments, E is KTYASMQW.

[0506] In some embodiments, the present disclosure provides for a polypeptide having Formula (III):

([A]-[B])-([D]ₓ-[E]_{y})_{z}, (III)
[0507] wherein
[0508] A comprises an amino acid sequence encoding a secretion signal peptide;
[0509] B comprises an amino acid encoding an alkaline phosphatase;
[0510] D comprises an amino acid sequence having between 4 and 6 amino acids;
[0511] E comprises an amino acid sequence having between 1 and 8 amino acids;
[0512] x is 0 or an integer ranging from 1 to 6;
[0513] y is 0 or an integer ranging from 1 to 16; and
[0514] z is an integer ranging from 1 to 6.

[0515] In some embodiments, the polypeptide of Formula (III) is catalytically competent to allow formation of hydroxyapatite crystals in bone.

[0516] In some embodiments, E comprises between 2 and 4 amino acids. In some embodiments, E comprises at least two different amino acids.

[0517] In some embodiments, x+y is at least 2, and where [D] and [E] comprise different amino acid sequences.

[0518] In other embodiments, x is 0, and [E] comprises at least three amino acids. In other embodiments, x is 0, and [E] comprises three amino acids. In other embodiments, x is 0, [E] comprises three amino acids, and y ranges from between 4 and 8. In other embodiments, x is 0, [E] comprises three amino acids, and y is 6.

[0519] In some embodiments, the amino acid encoding the alkaline phosphatase has at least about 90% identity to SEQ ID NO: 11. In yet other embodiments, the amino acid encoding the alkaline phosphatase has at least about 95% identity to SEQ ID NO: 11. In further embodiments, the amino acid encoding the alkaline phosphatase has at least about 96% identity to SEQ ID NO: 11. In even further embodiments, the amino acid encoding the alkaline phosphatase has at least about 97% identity to SEQ ID NO: 11. In yet even further embodiments, the amino acid encoding the alkaline phosphatase has at least about 98% identity to SEQ ID NO: 11. In yet even further embodiments, the amino acid encoding the alkaline phosphatase has at least about 99% identity to SEQ ID NO: 11. In some embodiments, the amino acid encoding the alkaline phosphatase comprises SEQ ID NO: 11.

[0520] In some embodiments, the amino acid encoding the alkaline phosphatase comprises a variant of SEQ ID NO: 11 comprising one or more amino acid substitutions. In some embodiments, the amino acid encoding the alkaline phosphatase comprises a variant of SEQ ID NO: 11 having a single amino acid substitution. For instance, a variant of SEQ ID NO: 11 may comprises a C102S substitution. By way of another example, a variant of SEQ ID NO: 11 may comprise an E434G substitution. By way of yet another example, a variant of SEQ ID NO: 11 may comprise an A321H substitution. In some embodiments, the amino acid encoding the alkaline phosphatase comprises a variant of SEQ ID NO: 11 having two amino acid substitutions. For instance, a variant of SEQ ID NO: 11 may comprise any two of a C102S substitution, an E434G substitution, or an A321H substitution, e.g. both an A321H substitution and an E434G substitution.

[0521] In some embodiments, the amino acid encoding the secretion signal peptide has at least 95% sequence identity to SEQ ID NO: 12. In yet other embodiments, the amino acid encoding the secretion signal peptide has at least 96% sequence identity to SEQ ID NO: 12. In further embodiments, the amino acid encoding the secretion signal peptide has at least 97% sequence identity to SEQ ID NO: 12. In yet further embodiments, the amino acid encoding the secretion signal peptide has at least 98% sequence identity to SEQ ID NO: 12. In even further embodiments, the amino acid encoding the secretion signal peptide has at least 99% sequence identity to SEQ ID NO: 12. In yet even further embodiments, the amino acid encoding the secretion signal peptide comprises SEQ ID NO: 12.

[0522] In some embodiments, the amino acid encoding the secretion signal peptide has at least 90% sequence identity to any one of SEQ ID NOS: 33-43. In other embodiments, the amino acid encoding the secretion signal peptide has at least 95% sequence identity to any one of SEQ ID NOS: 33-43. In yet other embodiments, the amino acid encoding the secretion signal peptide has at least 96% sequence identity to any one of SEQ ID NOS: 33-43. In further embodiments, the amino acid encoding the secretion signal peptide has at least 97% sequence identity to any one of SEQ ID NOS: 33-43. In yet further embodiments, the amino acid encoding the secretion signal peptide has at least 98% sequence identity to any one of SEQ ID NOS: 33-43. In even further embodiments, the amino acid encoding the secretion signal peptide has at least 99% sequence identity to any one of SEQ ID NOS: 33-43. In yet even further embodiments, the amino acid encoding the secretion signal peptide comprises any one of SEQ ID NOS: 33-43.

[0523] In some embodiments, the amino acid encoding the alkaline phosphatase has at least about 90% identity to SEQ ID NO: 11, and x+y=8 to 12. In some embodiments, the amino acid encoding the alkaline phosphatase has at least about 95% identity to SEQ ID NO: 11, and x+y=8 to 12. In some embodiments, the amino acid encoding the alkaline phosphatase has at least about 96% identity to SEQ ID NO: 11, and x+y=8 to 12. In some embodiments, the amino acid encoding the alkaline phosphatase has at least about 97% identity to SEQ ID NO: 11, and x+y=8 to 12. In some embodiments, the amino acid encoding the alkaline phosphatase has at least about 98% identity to SEQ ID NO: 11, and x+y=8 to 12. In some embodiments, the amino acid encoding the alkaline phosphatase has at least about 99% identity to SEQ ID NO: 11, and x+y=8 to 12. In some embodiments, the amino acid encoding the alkaline phosphatase comprises SEQ ID NO: 11, and x+y=8 to 12. In some embodiments, the amino acid encoding the alkaline phosphatase comprises SEQ ID NO: 11, and x+y=8 to 12.

[0524] In some embodiments, the amino acid encoding the alkaline phosphatase has at least about 90% identity to SEQ ID NO: 11, and x+y=4 to 8. In some embodiments, the amino acid encoding the alkaline phosphatase has at least about 95% identity to SEQ ID NO: 11, and x+y=4 to 8. In some embodiments, the amino acid encoding the alkaline phosphatase has at least about 96% identity to SEQ ID NO: 11, and wherein x+y=4 to 8. In some embodiments, the amino acid encoding the alkaline phosphatase has at least about 97% identity to SEQ ID NO: 11, and x+y=4 to 8. In some embodiments, the amino acid encoding the alkaline phosphatase has at least about 98% identity to SEQ ID NO: 11, and x+y=4 to 8. In some embodiments, the amino acid encoding the alkaline phosphatase has at least about 99% identity to SEQ ID NO: 11, and x+y=4 to 8. In some embodiments, the amino acid encoding the alkaline phosphatase comprises SEQ ID NO: 11, and x+y=4 to 8.

[0525] In some embodiments, D is GGGGS. In other embodiments, D is GGGSS. In yet other embodiments, D is GGSSS. In further embodiments, D is GGSGS. In even further embodiments, D is GGSGS.

[0526] In some embodiments, D is GGGGS or GGGSS, and x is an integer ranging from 1 to 4. In some embodiments, D is GGGGS or GGGSS, and x is an integer ranging from 1 to 3. In some embodiments, D is GGGGS or GGGSS, and x is 1 or 2. In some embodiments, D is GGGGS or GGGSS, and x is 2. In some embodiments, D is GGGGS, and x is 2.

[0527] In some embodiments, D is GGGGS or GGGSS, and x is an integer ranging from 1 to 4, and y is an integer ranging from between 4 and 12. In some embodiments, D is GGGGS or GGGSS, x is an integer ranging from 1 to 3 and y is an integer ranging from between 4 and 12. In some embodiments, D is GGGGS or GGGSS, x is 1 or 2, and y is an integer ranging from between 4 and 12. In some embodiments, D is GGGGS or GGGSS, x is 1 or 2, and y is 6. In some embodiments, D is GGGGS or GGGSS, x is 1 or 2, and y is 10.

[0528] In some embodiments, E comprises 1 amino acid, and y ranges from 4 to 16. In some embodiments, E comprises 1 amino acid, and y ranges from 4 to 12. In some embodiments, E comprises 1 amino acid, and y ranges from 6 to 12. In some embodiments, E comprises 1 amino acid, and y ranges from 8 to 10. In some embodiments, E comprises 1 amino acid, and y is 10.

[0529] In some embodiments, E is aspartic acid, and y ranges from 4 to 16. In some embodiments, E is aspartic acid, and y ranges from 4 to 12. In some embodiments, E is aspartic acid, and y ranges from 6 to 12. In some embodiments, E is aspartic acid, and y ranges from 8 to 10. In some embodiments, E is aspartic acid, and y is 10.

[0530] In some embodiments, E comprises 3 amino acids. In some embodiments, E comprises 3 amino acids, and y ranges from 1 to 16. In some embodiments, E comprises 3 amino acids, and y ranges from 1 to 12. In some embodiments, E comprises 3 amino acids, and y ranges from 1 to 10. In some embodiments, E comprises 3 amino acids, and y ranges from 1 to 8. In some embodiments, E comprises 3 amino acids, and y ranges from 4 to 8. In some embodiments, E comprises 3 amino acids, and y is 6.

[0531] In some embodiments, E is -D-S-S-. In other embodiments, E is -D-D-S-. In yet other embodiments, E is -D-D-D-.

[0532] In some embodiments, E is -D-S-S-, and y ranges from 1 to 16. In some embodiments, E is -D-S-S-, and y ranges from 1 to 12. In some embodiments, E is -D-S-S-, and y ranges from 1 to 10. In some embodiments, E is -D-S-S-, and y ranges from 4 to 8. In some embodiments, E is aspartic acid, and y ranges from 1 to 8. In some embodiments, E is -D-S-S-, and y is 6.

[0533] In some embodiments, E is KRRTPVRE. In other embodiments, E is KNFQSRSH. In yet other embodiments, E is KTYASMQW.

[0534] In some embodiments, D is GGGGS or GGGSS, x is an integer ranging from 1 to 3, E is -D-S-S-, and y is an integer ranging from between 1 and 8. In some embodiments, D is GGGGS or GGGSS, x is 1 or 2, E is -D-S-S-, and y is an integer ranging from between 1 and 8. In some embodiments, D is GGGGS or GGGSS, x is 1 or 2, E is -D-S-S-, and y is an integer ranging from between 4 and 8. In some embodiments, D is GGGGS or GGGSS, x is 1 or 2, E is -D-S-S-, and y is 6. In some embodiments, D is GGGGS, x is 1 or 2, E is -D-S-S-, and y is 6.

[0535] In some embodiments, D is GGGGS or GGGSS, x is an integer ranging from 1 to 3, E is aspartic acid, and y is an integer ranging from between 8 and 12. In some embodiments, D is GGGGS or GGGSS, x is 1 or 2, E is aspartic acid, and y is 10. In some embodiments, D is GGGGS or GGGSS, x is 2, E is aspartic acid, and y is 10. In some embodiments, D is GGGGS,
[0536] x is 2, E is aspartic acid, and y is 10.

[0537] In some embodiments, the present disclosure provides for a polypeptide having Formula (IV):

([A]-[B])-([E]_{y}), (IV)
[0538] wherein
[0539] A comprises an amino acid sequence encoding a secretion signal peptide;
[0540] B comprises an amino acid encoding an alkaline phosphatase;
[0541] E comprises an amino acid sequence having between 1 and 8 amino acids; and
[0542] y is 0 or an integer ranging from 1 to 16.

[0543] In some embodiments, the polypeptide of Formula (IV) is catalytically competent to allow formation of hydroxyapatite crystals in bone.

[0544] In some embodiments, E comprises between 2 and 4 amino acids. In some embodiments, E comprises at least two different amino acids.

[0545] In some embodiments, the amino acid encoding the alkaline phosphatase has at least about 90% identity to SEQ ID NO: 11. In yet other embodiments, the amino acid encoding the alkaline phosphatase has at least about 95% identity to SEQ ID NO: 11. In further embodiments, the amino acid encoding the alkaline phosphatase has at least about 96% identity to SEQ ID NO: 11. In even further embodiments, the amino acid encoding the alkaline phosphatase has at least about 97% identity to SEQ ID NO: 11. In yet even further embodiments, the amino acid encoding the alkaline phosphatase has at least about 98% identity to SEQ ID NO: 11. In yet even further embodiments, the amino acid encoding the alkaline phosphatase has at least about 99% identity to SEQ ID NO: 11. In some embodiments, the amino acid encoding the alkaline phosphatase comprises SEQ ID NO: 11.

[0546] In some embodiments, the amino acid encoding the alkaline phosphatase comprises a variant of SEQ ID NO: 11 comprising one or more amino acid substitutions. In some embodiments, the amino acid encoding the alkaline phosphatase comprises a variant of SEQ ID NO: 11 having a single amino acid substitution. For instance, a variant of SEQ ID NO: 11 may comprises a C102S substitution. By way of another example, a variant of SEQ ID NO: 11 may comprise an E434G substitution. By way of yet another example, a variant of SEQ ID NO: 11 may comprise an A321H substitution. In some embodiments, the amino acid encoding the alkaline phosphatase comprises a variant of SEQ ID NO: 11 having two amino acid substitutions. For instance, a variant of SEQ ID NO: 11 may comprise any two of a C102S substitution, an E434G substitution, or an A321H substitution, e.g. both an A321H substitution and an E434G substitution.

[0547] In some embodiments, the amino acid encoding the secretion signal peptide has at least 95% sequence identity to SEQ ID NO: 12. In yet other embodiments, the amino acid encoding the secretion signal peptide has at least 96% sequence identity to SEQ ID NO: 12. In further embodiments, the amino acid encoding the secretion signal peptide has at least 97% sequence identity to SEQ ID NO: 12. In yet further embodiments, the amino acid encoding the secretion signal peptide has at least 98% sequence identity to SEQ ID NO: 12. In even further embodiments, the amino acid encoding the secretion signal peptide has at least 99% sequence identity to SEQ ID NO: 12. In yet even further embodiments, the amino acid encoding the secretion signal peptide comprises SEQ ID NO: 12.

[0548] In some embodiments, the amino acid encoding the secretion signal peptide has at least 90% sequence identity to any one of SEQ ID NOS: 33-43. In other embodiments, the amino acid encoding the secretion signal peptide has at least 95% sequence identity to any one of SEQ ID NOS: 33-43. In yet other embodiments, the amino acid encoding the secretion signal peptide has at least 96% sequence identity to any one of SEQ ID NOS: 33-43. In further embodiments, the amino acid encoding the secretion signal peptide has at least 97% sequence identity to any one of SEQ ID NOS: 33-43. In yet further embodiments, the amino acid encoding the secretion signal peptide has at least 98% sequence identity to any one of SEQ ID NOS: 33-43. In even further embodiments, the amino acid encoding the secretion signal peptide has at least 99% sequence identity to any one of SEQ ID NOS: 33-43. In yet even further embodiments, the amino acid encoding the secretion signal peptide comprises any one of SEQ ID NOS: 33-43.

[0549] In some embodiments, E comprises 1 amino acid, and y ranges from 4 to 16. In some embodiments, E comprises 1 amino acid, and y ranges from 4 to 12. In some embodiments, E comprises 1 amino acid, and y ranges from 6 to 12. In some embodiments, E comprises 1 amino acid, and y ranges from 8 to 10. In some embodiments, E comprises 1 amino acid, and y is 10.

[0550] In some embodiments, E is aspartic acid, and y ranges from 4 to 16. In some embodiments, E is aspartic acid, and y ranges from 4 to 12. In some embodiments, E is aspartic acid, and y ranges from 6 to 12. In some embodiments, E is aspartic acid, and y ranges from 8 to 10. In some embodiments, E is aspartic acid, and y is 10.

[0551] In some embodiments, E comprises 3 amino acids. In some embodiments, E comprises 3 amino acids, and y ranges from 1 to 16. In some embodiments, E comprises 3 amino acids, and y ranges from 1 to 12. In some embodiments, E comprises 3 amino acids, and y ranges from 1 to 10. In some embodiments, E comprises 3 amino acids, and y ranges from 1 to 8. In some embodiments, E comprises 3 amino acids, and y ranges from 4 to 8. In some embodiments, E comprises 3 amino acids, and y is 6.

[0552] In some embodiments, E is -D-S-S-. In other embodiments, E is -D-D-S-. In other embodiments, E is -D-D-D-.

[0553] In some embodiments, E is -D-S-S-, and y ranges from 1 to 16. In some embodiments, E is -D-S-S-, and y ranges from 1 to 12. In some embodiments, E is -D-S-S-, and y ranges from 1 to 10. In some embodiments, E is -D-S-S-, and y ranges from 4 to 8. In some embodiments, E is aspartic acid, and y ranges from 1 to 8. In some embodiments, E is -D-S-S-, and y is 6.

[0554] In some embodiments, E comprises KRRTPVRE. In other embodiments, E comprises KNFQSRSH. In yet other embodiments, E comprises KTYASMQW.

[0555] In some embodiments, the present disclosure provides for a polypeptide having Formula (VA):

[A]-[B]-[R]_{q}-([E]_{y}) (VA)
[0556] wherein
[0557] A comprises an amino acid sequence encoding a secretion signal peptide;
[0558] B comprises an amino acid encoding an alkaline phosphatase;
[0559] R is -(Mₒ(Fc)Nₚ)-, where M and N each independently include between 1 and 6 amino acids, where Fc is a Fc domain, and o and p are each independently 0, 1, or 2;
[0560] q is 0 or 1;
[0561] E comprises an amino acid sequence having between 2 and 4 amino acids; and
[0562] y is integer ranging from 1 to 16.

[0563] In some embodiments, the polypeptide of Formula (IV) is catalytically competent to allow formation of hydroxyapatite crystals in bone.

[0564] In some embodiments, y is an integer ranging from 4-8. In some embodiments, y is 6. In some embodiments, y is an integer ranging from 4-8 and q is 0. In some embodiments, y is 6 and q is 0. In some embodiments, y is an integer ranging from 4-8 and q is 1. In some embodiments, y is 6 and q is 1.

[0565] In some embodiments, the amino acid encoding the alkaline phosphatase (“[B]”) is a tissue non-specific alkaline phosphatase. In some embodiments, the amino acid encoding the alkaline phosphatase has at least about 85% identity to SEQ ID NO: 11. In other embodiments, the amino acid encoding the alkaline phosphatase has at least about 90% identity to SEQ ID NO: 11. In other embodiments, the amino acid encoding the alkaline phosphatase has at least about 91% identity to SEQ ID NO: 11. In other embodiments, the amino acid encoding the alkaline phosphatase has at least about 92% identity to SEQ ID NO: 11. In other embodiments, the amino acid encoding the alkaline phosphatase has at least about 93% identity to SEQ ID NO: 11. In other embodiments, the amino acid encoding the alkaline phosphatase has at least about 94% identity to SEQ ID NO: 11.

[0566] In yet other embodiments, the amino acid encoding the alkaline phosphatase has at least about 95% identity to SEQ ID NO: 11. In further embodiments, the amino acid encoding the alkaline phosphatase has at least about 96% identity to SEQ ID NO: 11. In even further embodiments, the amino acid encoding the alkaline phosphatase has at least about 97% identity to SEQ ID NO: 11. In yet even further embodiments, the amino acid encoding the alkaline phosphatase has at least about 98% identity to SEQ ID NO: 11. In yet even further embodiments, the amino acid encoding the alkaline phosphatase has at least about 99% identity to SEQ ID NO: 11. In yet even further embodiments, the amino acid encoding the alkaline phosphatase has at least about 99% identity to SEQ ID NO: 11 and q is 0. In yet even further embodiments, the amino acid encoding the alkaline phosphatase has at least about 99% identity to SEQ ID NO: 11 and q is 1.

[0567] In some embodiments, the amino acid encoding the alkaline phosphatase comprises a variant of SEQ ID NO: 11, such as a variant comprising one or more amino acid substitutions. In some embodiments, the amino acid encoding the alkaline phosphatase comprises a variant of SEQ ID NO: 11 having a single amino acid substitution. For instance, a variant of SEQ ID NO: 11 may comprises a C102S substitution. By way of another example, a variant of SEQ ID NO: 11 may comprise an E434G substitution. By way of yet another example, a variant of SEQ ID NO: 11 may comprise an A321H substitution. In some embodiments, the amino acid encoding the alkaline phosphatase comprises a variant of SEQ ID NO: 11 having two amino acid substitutions. For instance, a variant of SEQ ID NO: 11 may comprise any two of a C102S substitution, an E434G substitution, or an A321H substitution, e.g. both an A321H substitution and an E434G substitution. In some embodiments, the amino acid encoding the alkaline phosphatase comprises a variant of SEQ ID NO: 11 having three amino acid substitutions. In some embodiments, the amino acid encoding the alkaline phosphatase comprises a variant of SEQ ID NO: 11 having four amino acid substitutions. In some embodiments, the amino acid encoding the alkaline phosphatase comprises a variant of SEQ ID NO: 11 having five amino acid substitutions. In some embodiments, the amino acid encoding the alkaline phosphatase comprises a variant of SEQ ID NO: 11 having six amino acid substitutions.

[0568] In some embodiments, the amino acid encoding the secretion signal peptide has at least 90% sequence identity to SEQ ID NO: 12. In other embodiments, the amino acid encoding the secretion signal peptide has at least 95% sequence identity to SEQ ID NO: 12. In yet other embodiments, the amino acid encoding the secretion signal peptide has at least 96% sequence identity to SEQ ID NO: 12. In further embodiments, the amino acid encoding the secretion signal peptide has at least 97% sequence identity to SEQ ID NO: 12. In yet further embodiments, the amino acid encoding the secretion signal peptide has at least 98% sequence identity to SEQ ID NO: 12. In even further embodiments, the amino acid encoding the secretion signal peptide has at least 99% sequence identity to SEQ ID NO: 12. In yet even further embodiments, the amino acid encoding the secretion signal peptide comprises SEQ ID NO: 12. In yet even other embodiments, the amino acid encoding the secretion signal peptide comprises SEQ ID NO: 12, and wherein [D]ₓ is [-GGGGS-]₂. In yet even other embodiments, the amino acid encoding the secretion signal peptide comprises SEQ ID NO: 12, and wherein [E]_{y} is [-DSS-]₆. In yet even other embodiments, the amino acid encoding the secretion signal peptide comprises SEQ ID NO: 12; [E]_{y} is [-DSS-]₆, and q is 0. In yet even other embodiments, the amino acid encoding the secretion signal peptide comprises SEQ ID NO: 12; [E]_{y} is [-DSS-]₆, and q is 1.

[0569] In some embodiments, the amino acid encoding the secretion signal peptide has at least 90% sequence identity to any one of SEQ ID NOS: 33-43. In other embodiments, the amino acid encoding the secretion signal peptide has at least 95% sequence identity to any one of SEQ ID NOS: 33-43. In yet other embodiments, the amino acid encoding the secretion signal peptide has at least 96% sequence identity to any one of SEQ ID NOS: 33-43. In further embodiments, the amino acid encoding the secretion signal peptide has at least 97% sequence identity to any one of SEQ ID NOS: 33-43. In yet further embodiments, the amino acid encoding the secretion signal peptide has at least 98% sequence identity to any one of SEQ ID NOS: 33-43. In even further embodiments, the amino acid encoding the secretion signal peptide has at least 99% sequence identity to any one of SEQ ID NOS: 33-43. In yet even further embodiments, the amino acid encoding the secretion signal peptide comprises any one of SEQ ID NOS: 33-43. In yet even other embodiments, the amino acid encoding the secretion signal peptide comprises any one of SEQ ID NOS: 33-43, and wherein [E]_{y} is [-DSS-]₆. In yet even other embodiments, the amino acid encoding the secretion signal peptide comprises any one of SEQ ID NOS: 33-43, [E]_{y} is [-DSS-]₆, and q is 0. In yet even other embodiments, the amino acid encoding the secretion signal peptide comprises any one of SEQ ID NOS: 33-43, [E]_{y} is [-DSS-]₆, and q is 1.

[0570] In some embodiments, the Fc domain has at least 90% sequence identity to that of SEQ ID NO: 130. In some embodiments, the Fc domain has at least 91% sequence identity to that of SEQ ID NO: 130. In some embodiments, the Fc domain has at least 92% sequence identity to that of SEQ ID NO: 130. In some embodiments, the Fc domain has at least 93% sequence identity to that of SEQ ID NO: 130. In some embodiments, the Fc domain has at least 94% sequence identity to that of SEQ ID NO: 130. In some embodiments, the Fc domain has at least 95% sequence identity to that of SEQ ID NO: 130. In some embodiments, the Fc domain has at least 96% sequence identity to that of SEQ ID NO: 130. In some embodiments, the Fc domain has at least 97% sequence identity to that of SEQ ID NO: 130. In some embodiments, the Fc domain has at least 98% sequence identity to that of SEQ ID NO: 130. In some embodiments, the Fc domain has at least 99% sequence identity to that of SEQ ID NO: 130. In some embodiments, the Fc domain comprises SEQ ID NO: 130. In some embodiments, the Fc domain comprises SEQ ID NO: 130 and y ranges from 4 to 6. In some embodiments, the Fc domain comprises SEQ ID NO: 130 and [E]_{y} is [DSS]₆. In some embodiments, the R comprises SEQ ID NO: 9 and [E]_{y} is [DSS]₆.

[0571] In some embodiments, M comprises 2 amino acids. For example, M may comprise leucine and lysine. In some embodiments, M is leucine-lysine. By way of another example, M may comprise two alanine amino acids In other embodiments, M comprises three amino acids.

[0572] In some embodiments, N comprises 2 amino acids (i.e., a diamino acid). For example, N may comprise aspartic acid and isoleucine. By way of another example, N may comprise two alanine amino acids. In some embodiments, N is aspartic acid—isoleucine. In other embodiments, N comprises 3 amino acids.

[0573] In some embodiments, M is leucine-lysine and N is aspartic acid—isoleucine. In some embodiments, M is leucine-lysine and N is aspartic acid—isoleucine and Fc has at least 90% sequence identity to that of SEQ ID NO: 130. In some embodiments, M is leucine-lysine and N is aspartic acid—isoleucine and Fc has at least 91% sequence identity to that of SEQ ID NO: 130. In some embodiments, M is leucine-lysine and N is aspartic acid—isoleucine and Fc has at least 92% sequence identity to that of SEQ ID NO: 130. In some embodiments, M is leucine-lysine and N is aspartic acid—isoleucine and Fc has at least 93% sequence identity to that of SEQ ID NO: 130. In some embodiments, M is leucine-lysine and N is aspartic acid—isoleucine and Fc has at least 94% sequence identity to that of SEQ ID NO: 130. In some embodiments, M is leucine-lysine and N is aspartic acid—isoleucine and Fc has at least 95% sequence identity to that of SEQ ID NO: 130. In some embodiments, M is leucine-lysine and N is aspartic acid—isoleucine and Fc has at least 96% sequence identity to that of SEQ ID NO: 130. In some embodiments, M is leucine-lysine and N is aspartic acid—isoleucine and Fc has at least 97% sequence identity to that of SEQ ID NO: 130. In some embodiments, M is leucine-lysine and N is aspartic acid—isoleucine and Fc has at least 98% sequence identity to that of SEQ ID NO: 130. In some embodiments, M is leucine-lysine and N is aspartic acid—isoleucine and Fc has at least 99% sequence identity to that of SEQ ID NO: 130. In some embodiments, M is leucine-lysine and N is aspartic acid—isoleucine and Fc comprises SEQ ID NO: 130.

[0574] In some embodiments, M is leucine-lysine and N is aspartic acid—isoleucine; and o, p, and q are each 1. In some embodiments, M is leucine-lysine and N is aspartic acid—isoleucine and Fc has at least 90% sequence identity to that of SEQ ID NO: 130; and o, p, and q are each 1. In some embodiments, M is leucine-lysine and N is aspartic acid—isoleucine and Fc has at least 91% sequence identity to that of SEQ ID NO: 130; and o, p, and q are each 1. In some embodiments, M is leucine-lysine and N is aspartic acid—isoleucine and Fc has at least 92% sequence identity to that of SEQ ID NO: 130; and o, p, and q are each 1. In some embodiments, M is leucine-lysine and N is aspartic acid—isoleucine and Fc has at least 93% sequence identity to that of SEQ ID NO: 130; and o, p, and q are each 1. In some embodiments, M is leucine-lysine and N is aspartic acid—isoleucine and Fc has at least 94% sequence identity to that of SEQ ID NO: 130; and o, p, and q are each 1. In some embodiments, M is leucine-lysine and N is aspartic acid—isoleucine and Fc has at least 95% sequence identity to that of SEQ ID NO: 130; and o, p, and q are each 1. In some embodiments, M is leucine-lysine and N is aspartic acid—isoleucine and Fc has at least 96% sequence identity to that of SEQ ID NO: 130; and o, p, and q are each 1. In some embodiments, M is leucine-lysine and N is aspartic acid—isoleucine and Fc has at least 97% sequence identity to that of SEQ ID NO: 130; and o, p, and q are each 1. In some embodiments, M is leucine-lysine and N is aspartic acid—isoleucine and Fc has at least 98% sequence identity to that of SEQ ID NO: 130; and o, p, and q are each 1. In some embodiments, M is leucine-lysine and N is aspartic acid—isoleucine and Fc has at least 99% sequence identity to that of SEQ ID NO: 130; and o, p, and q are each 1. In some embodiments, M is leucine-lysine; N is aspartic acid—isoleucine and Fc comprises SEQ ID NO: 130; and o, p, and q are each 1. In some embodiments, M is leucine-lysine; N is aspartic acid—isoleucine; Fc comprises SEQ ID NO: 130; o, p, and q are each 1; and [A] has at least 99% identity to any one of SEQ ID NOS: 12 and 33-43. In some embodiments, M is leucine-lysine; N is aspartic acid—isoleucine; Fc comprises; o, p, and q are each 1; and [A] comprises any one of SEQ ID NOS: 12 and 33-43.

[0575] In some embodiments, E comprises 3 amino acids. In some embodiments, E comprises 3 amino acids, and y ranges from 1 to 16. In some embodiments, E comprises 3 amino acids, and y ranges from 1 to 12. In some embodiments, E comprises 3 amino acids, and y ranges from 1 to 10. In some embodiments, E comprises 3 amino acids, and y ranges from 1 to 8. In some embodiments, E comprises 3 amino acids, and y ranges from 4 to 8. In some embodiments, E comprises 3 amino acids, and y is 6.

[0576] In some embodiments, E is -D-S-S-. In other embodiments, E is -D-D-S-.

[0577] In some embodiments, E is -D-S-S-, and y ranges from 1 to 16. In some embodiments, E is -D-S-S-, and y ranges from 1 to 12. In some embodiments, E is -D-S-S-, and y ranges from 1 to 10. In some embodiments, E is -D-S-S-, and y ranges from 4 to 8. In some embodiments, E is aspartic acid, and y ranges from 1 to 8. In some embodiments, E is -D-S-S-, and y is 6.

[0578] In some embodiments, the present disclosure provides for a polypeptide having Formula (VB):

[A]-[B]-[R]_{q}-([E]_{y}) (VB)
[0579] wherein
[0580] A comprises an amino acid sequence encoding a secretion signal peptide;
[0581] B comprises an amino acid encoding an alkaline phosphatase;
[0582] R is -(Mₒ(Fc)Nₚ)-, where M and N each independently include between 1 and 6 amino acids, where Fc is a Fc domain, and o and p are each independently 0, 1, or 2;
[0583] q is 0 or 1;
[0584] E comprises an amino acid sequence having between 2 and 4 amino acids; and
[0585] y is integer ranging from 1 to 16,
[0586] provided that when q is 1 and when [E] comprises only aspartic acid, then the polypeptide of Formula (V) does not comprise an amino acid sequence having ten to sixteen contiguous aspartic acid residues; or provided that the polypeptide of Formula (V) does not have the amino acid sequence of SEQ ID NO: 1 or does not comprise an amino acid sequence encoded by the nucleotide sequence of SEQ ID NO: 107; or provided that the polypeptide of Formula (V) is not Strensiq® or Asfotase alfa.

[0587] In some embodiments, the polypeptide of Formula (IV) is catalytically competent to allow formation of hydroxyapatite crystals in bone.

[0588] In some embodiments, y is an integer ranging from 4-8. In some embodiments, y is 6. In some embodiments, y is an integer ranging from 4-8 and q is 0. In some embodiments, y is 6 and q is 0. In some embodiments, y is an integer ranging from 4-8 and q is 1. In some embodiments, y is 6 and q is 1.

[0589] In some embodiments, the amino acid encoding the alkaline phosphatase (“[B]”) is a tissue non-specific alkaline phosphatase. In some embodiments, the amino acid encoding the alkaline phosphatase has at least about 85% identity to SEQ ID NO: 11. In other embodiments, the amino acid encoding the alkaline phosphatase has at least about 90% identity to SEQ ID NO: 11. In other embodiments, the amino acid encoding the alkaline phosphatase has at least about 91% identity to SEQ ID NO: 11. In other embodiments, the amino acid encoding the alkaline phosphatase has at least about 92% identity to SEQ ID NO: 11. In other embodiments, the amino acid encoding the alkaline phosphatase has at least about 93% identity to SEQ ID NO: 11. In other embodiments, the amino acid encoding the alkaline phosphatase has at least about 94% identity to SEQ ID NO: 11.

[0590] In yet other embodiments, the amino acid encoding the alkaline phosphatase has at least about 95% identity to SEQ ID NO: 11. In further embodiments, the amino acid encoding the alkaline phosphatase has at least about 96% identity to SEQ ID NO: 11. In even further embodiments, the amino acid encoding the alkaline phosphatase has at least about 97% identity to SEQ ID NO: 11. In yet even further embodiments, the amino acid encoding the alkaline phosphatase has at least about 98% identity to SEQ ID NO: 11. In yet even further embodiments, the amino acid encoding the alkaline phosphatase has at least about 99% identity to SEQ ID NO: 11. In yet even further embodiments, the amino acid encoding the alkaline phosphatase has at least about 99% identity to SEQ ID NO: 11 and q is 0. In yet even further embodiments, the amino acid encoding the alkaline phosphatase has at least about 99% identity to SEQ ID NO: 11 and q is 1.

[0591] In some embodiments, the amino acid encoding the alkaline phosphatase comprises a variant of SEQ ID NO: 11, such as a variant comprising one or more amino acid substitutions. In some embodiments, the amino acid encoding the alkaline phosphatase comprises a variant of SEQ ID NO: 11 having a single amino acid substitution. For instance, a variant of SEQ ID NO: 11 may comprises a C102S substitution. By way of another example, a variant of SEQ ID NO: 11 may comprise an E434G substitution. By way of yet another example, a variant of SEQ ID NO: 11 may comprise an A321H substitution. In some embodiments, the amino acid encoding the alkaline phosphatase comprises a variant of SEQ ID NO: 11 having two amino acid substitutions. For instance, a variant of SEQ ID NO: 11 may comprise any two of a C102S substitution, an E434G substitution, or an A321H substitution, e.g. both an A321H substitution and an E434G substitution. In some embodiments, the amino acid encoding the alkaline phosphatase comprises a variant of SEQ ID NO: 11 having three amino acid substitutions. In some embodiments, the amino acid encoding the alkaline phosphatase comprises a variant of SEQ ID NO: 11 having four amino acid substitutions. In some embodiments, the amino acid encoding the alkaline phosphatase comprises a variant of SEQ ID NO: 11 having five amino acid substitutions. In some embodiments, the amino acid encoding the alkaline phosphatase comprises a variant of SEQ ID NO: 11 having six amino acid substitutions.

[0592] In some embodiments, the amino acid encoding the secretion signal peptide has at least 90% sequence identity to SEQ ID NO: 12. In other embodiments, the amino acid encoding the secretion signal peptide has at least 95% sequence identity to SEQ ID NO: 12. In yet other embodiments, the amino acid encoding the secretion signal peptide has at least 96% sequence identity to SEQ ID NO: 12. In further embodiments, the amino acid encoding the secretion signal peptide has at least 97% sequence identity to SEQ ID NO: 12. In yet further embodiments, the amino acid encoding the secretion signal peptide has at least 98% sequence identity to SEQ ID NO: 12. In even further embodiments, the amino acid encoding the secretion signal peptide has at least 99% sequence identity to SEQ ID NO: 12. In yet even further embodiments, the amino acid encoding the secretion signal peptide comprises SEQ ID NO: 12. In yet even other embodiments, the amino acid encoding the secretion signal peptide comprises SEQ ID NO: 12, and wherein [D]ₓ is [-GGGGS-]₂. In yet even other embodiments, the amino acid encoding the secretion signal peptide comprises SEQ ID NO: 12, and wherein [E]_{y} is [-DSS-]₆. In yet even other embodiments, the amino acid encoding the secretion signal peptide comprises SEQ ID NO: 12; [E]_{y} is [-DSS-]₆, and q is 0. In yet even other embodiments, the amino acid encoding the secretion signal peptide comprises SEQ ID NO: 12; [E]_{y} is [-DSS-]₆, and q is 1.

[0593] In some embodiments, the amino acid encoding the secretion signal peptide has at least 90% sequence identity to any one of SEQ ID NOS: 33-43. In other embodiments, the amino acid encoding the secretion signal peptide has at least 95% sequence identity to any one of SEQ ID NOS: 33-43. In yet other embodiments, the amino acid encoding the secretion signal peptide has at least 96% sequence identity to any one of SEQ ID NOS: 33-43. In further embodiments, the amino acid encoding the secretion signal peptide has at least 97% sequence identity to any one of SEQ ID NOS: 33-43. In yet further embodiments, the amino acid encoding the secretion signal peptide has at least 98% sequence identity to any one of SEQ ID NOS: 33-43. In even further embodiments, the amino acid encoding the secretion signal peptide has at least 99% sequence identity to any one of SEQ ID NOS: 33-43. In yet even further embodiments, the amino acid encoding the secretion signal peptide comprises any one of SEQ ID NOS: 33-43. In yet even other embodiments, the amino acid encoding the secretion signal peptide comprises any one of SEQ ID NOS: 33-43, and wherein [E]_{y} is [-DSS-]₆. In yet even other embodiments, the amino acid encoding the secretion signal peptide comprises any one of SEQ ID NOS: 33-43, [E]_{y} is [-DSS-]₆, and q is 0. In yet even other embodiments, the amino acid encoding the secretion signal peptide comprises any one of SEQ ID NOS: 33-43, [E]_{y} is [-DSS-]₆, and q is 1.

[0594] In some embodiments, the Fc domain has at least 90% sequence identity to that of SEQ ID NO: 130. In some embodiments, the Fc domain has at least 91% sequence identity to that of SEQ ID NO: 130. In some embodiments, the Fc domain has at least 92% sequence identity to that of SEQ ID NO: 130. In some embodiments, the Fc domain has at least 93% sequence identity to that of SEQ ID NO: 130. In some embodiments, the Fc domain has at least 94% sequence identity to that of SEQ ID NO: 130. In some embodiments, the Fc domain has at least 95% sequence identity to that of SEQ ID NO: 130. In some embodiments, the Fc domain has at least 96% sequence identity to that of SEQ ID NO: 130. In some embodiments, the Fc domain has at least 97% sequence identity to that of SEQ ID NO: 130. In some embodiments, the Fc domain has at least 98% sequence identity to that of SEQ ID NO: 130. In some embodiments, the Fc domain has at least 99% sequence identity to that of SEQ ID NO: 130. In some embodiments, the Fc domain comprises SEQ ID NO: 130. In some embodiments, the Fc domain comprises SEQ ID NO: 130 and y ranges from 4 to 6. In some embodiments, the Fc domain comprises SEQ ID NO: 130 and [E]_{y} is [DSS]₆. In some embodiments, the R comprises SEQ ID NO: 9 and [E]_{y} is [DSS]₆.

[0595] In some embodiments, M comprises 2 amino acids. For example, M may comprise leucine and lysine. In some embodiments, M is leucine-lysine. By way of another example, M may comprise two alanine amino acids In other embodiments, M comprises three amino acids.

[0596] In some embodiments, N comprises 2 amino acids (i.e., a diamino acid). For example, N may comprise aspartic acid and isoleucine. By way of another example, N may comprise two alanine amino acids. In some embodiments, N is aspartic acid—isoleucine. In other embodiments, N comprises 3 amino acids.

[0597] In some embodiments, M is leucine-lysine and N is aspartic acid—isoleucine. In some embodiments, M is leucine-lysine and N is aspartic acid—isoleucine and Fc has at least 90% sequence identity to that of SEQ ID NO: 130. In some embodiments, M is leucine-lysine and N is aspartic acid—isoleucine and Fc has at least 91% sequence identity to that of SEQ ID NO: 130. In some embodiments, M is leucine-lysine and N is aspartic acid—isoleucine and Fc has at least 92% sequence identity to that of SEQ ID NO: 130. In some embodiments, M is leucine-lysine and N is aspartic acid—isoleucine and Fc has at least 93% sequence identity to that of SEQ ID NO: 130. In some embodiments, M is leucine-lysine and N is aspartic acid—isoleucine and Fc has at least 94% sequence identity to that of SEQ ID NO: 130. In some embodiments, M is leucine-lysine and N is aspartic acid—isoleucine and Fc has at least 95% sequence identity to that of SEQ ID NO: 130. In some embodiments, M is leucine-lysine and N is aspartic acid—isoleucine and Fc has at least 96% sequence identity to that of SEQ ID NO: 130. In some embodiments, M is leucine-lysine and N is aspartic acid—isoleucine and Fc has at least 97% sequence identity to that of SEQ ID NO: 130. In some embodiments, M is leucine-lysine and N is aspartic acid—isoleucine and Fc has at least 98% sequence identity to that of SEQ ID NO: 130. In some embodiments, M is leucine-lysine and N is aspartic acid—isoleucine and Fc has at least 99% sequence identity to that of SEQ ID NO: 130. In some embodiments, M is leucine-lysine and N is aspartic acid—isoleucine and Fc comprises SEQ ID NO: 130.

[0598] In some embodiments, M is leucine-lysine and N is aspartic acid—isoleucine; and o, p, and q are each 1. In some embodiments, M is leucine-lysine and N is aspartic acid—isoleucine and Fc has at least 90% sequence identity to that of SEQ ID NO: 130; and o, p, and q are each 1. In some embodiments, M is leucine-lysine and N is aspartic acid—isoleucine and Fc has at least 91% sequence identity to that of SEQ ID NO: 130; and o, p, and q are each 1. In some embodiments, M is leucine-lysine and N is aspartic acid—isoleucine and Fc has at least 92% sequence identity to that of SEQ ID NO: 130; and o, p, and q are each 1. In some embodiments, M is leucine-lysine and N is aspartic acid—isoleucine and Fc has at least 93% sequence identity to that of SEQ ID NO: 130; and o, p, and q are each 1. In some embodiments, M is leucine-lysine and N is aspartic acid—isoleucine and Fc has at least 94% sequence identity to that of SEQ ID NO: 130; and o, p, and q are each 1. In some embodiments, M is leucine-lysine and N is aspartic acid—isoleucine and Fc has at least 95% sequence identity to that of SEQ ID NO: 130; and o, p, and q are each 1. In some embodiments, M is leucine-lysine and N is aspartic acid—isoleucine and Fc has at least 96% sequence identity to that of SEQ ID NO: 130; and o, p, and q are each 1. In some embodiments, M is leucine-lysine and N is aspartic acid—isoleucine and Fc has at least 97% sequence identity to that of SEQ ID NO: 130; and o, p, and q are each 1. In some embodiments, M is leucine-lysine and N is aspartic acid—isoleucine and Fc has at least 98% sequence identity to that of SEQ ID NO: 130; and o, p, and q are each 1. In some embodiments, M is leucine-lysine and N is aspartic acid—isoleucine and Fc has at least 99% sequence identity to that of SEQ ID NO: 130; and o, p, and q are each 1. In some embodiments, M is leucine-lysine; N is aspartic acid—isoleucine and Fc comprises SEQ ID NO: 130; and o, p, and q are each 1. In some embodiments, M is leucine-lysine; N is aspartic acid—isoleucine; Fc comprises SEQ ID NO: 130; o, p, and q are each 1; and [A] has at least 99% identity to any one of SEQ ID NOS: 12 and 33-43. In some embodiments, M is leucine-lysine; N is aspartic acid—isoleucine; Fc comprises; o, p, and q are each 1; and [A] comprises any one of SEQ ID NOS: 12 and 33-43.

[0599] In some embodiments, E comprises 3 amino acids. In some embodiments, E comprises 3 amino acids, and y ranges from 1 to 16. In some embodiments, E comprises 3 amino acids, and y ranges from 1 to 12. In some embodiments, E comprises 3 amino acids, and y ranges from 1 to 10. In some embodiments, E comprises 3 amino acids, and y ranges from 1 to 8. In some embodiments, E comprises 3 amino acids, and y ranges from 4 to 8. In some embodiments, E comprises 3 amino acids, and y is 6.

[0600] In some embodiments, E is -D-S-S-. In other embodiments, E is -D-D-S-.

[0601] In some embodiments, E is -D-S-S-, and y ranges from 1 to 16. In some embodiments, E is -D-S-S-, and y ranges from 1 to 12. In some embodiments, E is -D-S-S-, and y ranges from 1 to 10. In some embodiments, E is -D-S-S-, and y ranges from 4 to 8. In some embodiments, E is aspartic acid, and y ranges from 1 to 8. In some embodiments, E is -D-S-S-, and y is 6.

### Examples of Polypeptides Having Any One of Formulas (I), (IA), (IB), (II), (III), (IV), (VA) and (VB) (hereinafter “Formulas (I)-(V)”)

[0602] In some embodiments, the polypeptide comprises an amino acid sequence having at least 85% identity to SEQ ID NO: 2. In some embodiments, the polypeptide comprises an amino acid sequence having at least 90% identity to SEQ ID NO: 2. In some embodiments, the polypeptide comprises an amino acid sequence having at least 95% identity to SEQ ID NO: 2. In some embodiments, the polypeptide comprises an amino acid sequence having at least 96% identity to SEQ ID NO: 2. In some embodiments, the polypeptide comprises an amino acid sequence having at least 97% identity to SEQ ID NO: 2. In some embodiments, the polypeptide comprises an amino acid sequence having at least 98% identity to SEQ ID NO: 2. In some embodiments, the polypeptide comprises an amino acid sequence having at least 99% identity to SEQ ID NO: 2. In some embodiments, the polypeptide comprises SEQ ID NO: 2.

[0603] In some embodiments, the polypeptide comprises an amino acid sequence having at least 85% identity to SEQ ID NO: 3. In some embodiments, the polypeptide comprises an amino acid sequence having at least 90% identity to SEQ ID NO: 3. In some embodiments, the polypeptide comprises an amino acid sequence having at least 95% identity to SEQ ID NO: 3. In some embodiments, the polypeptide comprises an amino acid sequence having at least 96% identity to SEQ ID NO: 3. In some embodiments, the polypeptide comprises an amino acid sequence having at least 97% identity to SEQ ID NO: 3. In some embodiments, the polypeptide comprises an amino acid sequence having at least 98% identity to SEQ ID NO: 3. In some embodiments, the polypeptide comprises an amino acid sequence having at least 99% identity to SEQ ID NO: 3. In some embodiments, the polypeptide comprises SEQ ID NO: 3.

[0604] In some embodiments, the polypeptide comprises an amino acid sequence having at least 85% identity to SEQ ID NO: 4. In some embodiments, the polypeptide comprises an amino acid sequence having at least 90% identity to SEQ ID NO: 4. In some embodiments, the polypeptide comprises an amino acid sequence having at least 95% identity to SEQ ID NO: 4. In some embodiments, the polypeptide comprises an amino acid sequence having at least 96% identity to SEQ ID NO: 4. In some embodiments, the polypeptide comprises an amino acid sequence having at least 97% identity to SEQ ID NO: 4. In some embodiments, the polypeptide comprises an amino acid sequence having at least 98% identity to SEQ ID NO: 4. In some embodiments, the polypeptide comprises an amino acid sequence having at least 99% identity to SEQ ID NO: 4. In some embodiments, the polypeptide comprises SEQ ID NO: 4.

[0605] In some embodiments, the polypeptide comprises an amino acid sequence having at least 85% identity to SEQ ID NO: 5. In some embodiments, the polypeptide comprises an amino acid sequence having at least 90% identity to SEQ ID NO: 5. In some embodiments, the polypeptide comprises an amino acid sequence having at least 95% identity to SEQ ID NO: 5. In some embodiments, the polypeptide comprises an amino acid sequence having at least 96% identity to SEQ ID NO: 5. In some embodiments, the polypeptide comprises an amino acid sequence having at least 97% identity to SEQ ID NO: 5. In some embodiments, the polypeptide comprises an amino acid sequence having at least 98% identity to SEQ ID NO: 5. In some embodiments, the polypeptide comprises an amino acid sequence having at least 99% identity to SEQ ID NO: 5. In some embodiments, the polypeptide comprises SEQ ID NO: 5.

[0606] In some embodiments, the polypeptide comprises an amino acid sequence having at least 85% identity to SEQ ID NO: 6. In some embodiments, the polypeptide comprises an amino acid sequence having at least 90% identity to SEQ ID NO: 6. In some embodiments, the polypeptide comprises an amino acid sequence having at least 95% identity to SEQ ID NO: 6. In some embodiments, the polypeptide comprises an amino acid sequence having at least 96% identity to SEQ ID NO: 6. In some embodiments, the polypeptide comprises an amino acid sequence having at least 97% identity to SEQ ID NO: 6. In some embodiments, the polypeptide comprises an amino acid sequence having at least 98% identity to SEQ ID NO: 6. In some embodiments, the polypeptide comprises an amino acid sequence having at least 99% identity to SEQ ID NO: 6. In some embodiments, the polypeptide comprises SEQ ID NO: 6.

[0607] In some embodiments, the polypeptide comprises an amino acid sequence having at least 85% identity to SEQ ID NO: 7. In some embodiments, the polypeptide comprises an amino acid sequence having at least 90% identity to SEQ ID NO: 7. In some embodiments, the polypeptide comprises an amino acid sequence having at least 95% identity to SEQ ID NO: 7. In some embodiments, the polypeptide comprises an amino acid sequence having at least 96% identity to SEQ ID NO: 7. In some embodiments, the polypeptide comprises an amino acid sequence having at least 97% identity to SEQ ID NO: 7. In some embodiments, the polypeptide comprises an amino acid sequence having at least 98% identity to SEQ ID NO: 7. In some embodiments, the polypeptide comprises an amino acid sequence having at least 99% identity to SEQ ID NO: 7. In some embodiments, the polypeptide comprises SEQ ID NO: 7.

[0608] In some embodiments, the polypeptide comprises an amino acid sequence having at least 85% identity to SEQ ID NO: 8. In some embodiments, the polypeptide comprises an amino acid sequence having at least 90% identity to SEQ ID NO: 8. In some embodiments, the polypeptide comprises an amino acid sequence having at least 95% identity to SEQ ID NO: 8. In some embodiments, the polypeptide comprises an amino acid sequence having at least 96% identity to SEQ ID NO: 8. In some embodiments, the polypeptide comprises an amino acid sequence having at least 97% identity to SEQ ID NO: 8. In some embodiments, the polypeptide comprises an amino acid sequence having at least 98% identity to SEQ ID NO: 8. In some embodiments, the polypeptide comprises an amino acid sequence having at least 99% identity to SEQ ID NO: 8. In some embodiments, the polypeptide comprises SEQ ID NO: 8.

[0609] In some embodiments, the polypeptide of the present disclosure has an amino acid sequence having at least 85% sequence identity to any one of SEQ ID NOS: 44-54, 68, 75, 105, and 116-125. In some embodiments, the polypeptide of the present disclosure has at least 90% sequence identity to any one of SEQ ID NOS: 44-54, 68, 75, 105, and 116-125. In some embodiments, the polypeptide of the present disclosure has an amino acid sequence having at least 95% sequence identity to any one of SEQ ID NOS: 44-54, 68, 75, 105, and 116-125. In some embodiments, the polypeptide of the present disclosure has an amino acid sequence having at least 96% sequence identity to any one of SEQ ID NOS: 44-54, 68, 75, 105, and 116-125. In some embodiments, the polypeptide of the present disclosure has an amino acid sequence having at least 95% sequence identity to any one of SEQ ID NOS: 44-54, 68, 75, 105, and 116-125. In some embodiments, the polypeptide of the present disclosure has an amino acid sequence having at least 97% sequence identity to any one of SEQ ID NOS: 44-54, 68, 75, 105, and 116-125. In some embodiments, the polypeptide of the present disclosure has an amino acid sequence having at least 98% sequence identity to any one of SEQ ID NOS: 44-54, 68, 75, 105, and 116-125. In some embodiments, the polypeptide of the present disclosure has an amino acid sequence having at least 99% sequence identity to any one of SEQ ID NOS: 44-54, 68, 75, 105, and 116-125. In some embodiments, polypeptide of the present disclosure comprises any one of SEQ ID NOS: 44-54, 68, 75, 105, and 116-125.

[0610] In some embodiments, the polypeptide of the present disclosure is encoded by a nucleotide sequence having at least 80% identity to any one of SEQ ID NOS: 106, 108-115, and 131. In some embodiments, the polypeptide of the present disclosure is encoded by a nucleotide sequence having at least 85% identity to any one of SEQ ID NOS: 106, 108-115, and 131. In some embodiments, the polypeptide of the present disclosure is encoded by a nucleotide sequence having at least 90% identity to any one of SEQ ID NOS: 106, 108-115, and 131. In some embodiments, the polypeptide of the present disclosure is encoded by a nucleotide sequence having at least 91% identity to any one of SEQ ID NOS: 106, 108-115, and 131. In some embodiments, the polypeptide of the present disclosure is encoded by a nucleotide sequence having at least 92% identity to any one of SEQ ID NOS: 106, 108-115, and 131. In some embodiments, the polypeptide of the present disclosure is encoded by a nucleotide sequence having at least 93% identity to any one of SEQ ID NOS: 106, 108-115, and 131. In some embodiments, the polypeptide of the present disclosure is encoded by a nucleotide sequence having at least 94% identity to any one of SEQ ID NOS: 106, 108-115, and 131. In some embodiments, the polypeptide of the present disclosure is encoded by a nucleotide sequence having at least 95% identity to any one of SEQ ID NOS: 106, 108-115, and 131. In some embodiments, the polypeptide of the present disclosure is encoded by a nucleotide sequence having at least 96% identity to any one of SEQ ID NOS: 106, 108-115, and 131. In some embodiments, the polypeptide of the present disclosure is encoded by a nucleotide sequence having at least 97% identity to any one of SEQ ID NOS: 106, 108-115, and 131. In some embodiments, the polypeptide of the present disclosure is encoded by a nucleotide sequence having at least 98% identity to any one of SEQ ID NOS: 106, 108-115, and 131. In some embodiments, the polypeptide of the present disclosure is encoded by a nucleotide sequence having at least 99% identity to any one of SEQ ID NOS: 106, 108-115, and 131. In some embodiments, the polypeptide of the present disclosure is encoded by a nucleotide sequence having any one of SEQ ID NOS: 106, 108-115, and 131.

[0611] Delivery Platforms

[0612] In another aspect of the present disclosure are delivery platforms, e.g. non-viral vectors and viral vectors. In some embodiments, the non-viral vectors include bacterial plasmids, minicircle DNA, minivector DNA, linear DNA, particles, nanoparticles, etc. In some embodiments, non-viral particles include liposomes such as, for example, those disclosed in U.S. Pat. No. 5,422,120, and in PCT Publication Nos. WO 95/13796, WO 94/23697, and WO 91/14445, particularly including heterovesicular liposomal particles, the disclosures of which are hereby incorporated by reference herein in their entireties. In some embodiments, non-viral vectors may be delivered to a cell or a subject according to various methods, which include, but are not limited, to injection, electroporation, gene gun, sonoporation, magnetofection, hydrodynamic delivery, or other physical or chemical methods. In some embodiments, therapeutic genes can be inserted directly into the plasmid, and then this recombinant plasmid can be introduced into cells in a variety of ways. For example, it can be injected directly into targeted tissues as naked-DNA. Other non-limiting examples of non-viral delivery vehicles are described in PCT Publication Nos. WO/2005/123142. WO/2012/017119, WO/1995/021195, WO/2012/017118, WO/2016/016358, WO/2006/122542, and WO/2014/072929, the disclosures of which are hereby incorporated by reference herein in their entireties.

[0613] In some embodiments, the delivery platforms are viral expression vectors which encode a polypeptide, such as a polypeptide comprising a nucleic acid sequence encoding an alkaline phosphatase or a variant thereof for expression. In some embodiments, the expression vectors may be retroviral vectors, lentiviral vectors, adenovirus vectors, AAV vectors, etc.

[0614] In some embodiments, the expression vectors are lentiviral vectors. Lentiviruses are a subclass of Retroviruses. Lentiviruses resemble 7-retroviruses (γ-RV) in their ability to stably integrate into the target cell genome, resulting in persistent expression of the gene of interest. However, in contrast to γ-retroviruses, lentiviruses also can transduce nondividing cells, which has led to their wide use as gene transfer vectors. In some embodiments, the lentivirus genome is monopartite, linear, dimeric, positive-strand single-stranded RNA (ssRNA(+)″) of 9.75 kb, with a 5′-cap and a 3′poly-A tail. In some embodiments, the lentiviral genome is flanked by the ‘ and 3’ long terminal repeat (LTR) sequences which have promoter/enhancer activity and are essential for the correct expression of the full-length lentiviral vector transcript. In some embodiments, the LTRs also have an important role in reverse transcription and integration of the vector into the target cell genome. In some embodiments, upon viral entry into a cell, the RNA genome is reverse-transcribed into double-stranded DNA, which is then inserted into the genome at a random position by the viral integrase enzyme. In some embodiments, the lentivirus, now called a provirus, remains in the genome and is passed on to the progeny of the cell when it divides.

[0615] Examples of species of lentivirus include, for example, human immunodeficiency virus 1 (HIV-1), human immunodeficiency virus 2 (HIV-2), simian immunodeficiency virus (SIV), bovine immunodeficiency virus (BIV), and feline immunodeficiency virus (FIV). In some embodiments, the lentiviral vector of the present disclosure can be based on any lentivirus species. In some embodiments, the lentiviral vector is based on a human immunodeficiency virus (e.g., HIV-1 or HIV-2), most preferably HIV-1.

[0616] Lentiviral vectors typically are generated by trans-complementation in packaging cells that are co-transfected with a plasmid containing the vector genome and the packaging constructs that encode only the proteins essential for lentiviral assembly and function. In some embodiments, a self-inactivating (SIN) lentiviral vector can be generated by abolishing the intrinsic promoter/enhancer activity of the HIV-1 LTR, which reduces the likelihood of aberrant expression of cellular coding sequences located adjacent to the vector integration site (see, e.g., Vigna et al., J. Gene Med., 2: 308-316 (2000); Naldini et al., Science, 272: 263-267 (1996); and Mátrai et al., Molecular Therapy, 18(3): 477-490 (2010)). In some embodiments, most common procedure to generate lentiviral vectors is to co-transfect cell lines (e.g., 293T human embryonic kidney cells) with a lentiviral vector plasmid and three packaging constructs encoding the viral Gag-Pol, Rev-Tat, and envelope (Env) proteins.

[0617] Methods for generating lentiviral vectors are well-known in the art, and the lentiviral vectors of the present disclosure can be constructed using any suitable such method. In some embodiments, lentiviral vectors typically are produced by co-transfecting 293T human embryonic kidney cells with several different plasmid constructs, which separately contain the lentiviral cis-acting sequences and trans-acting factors that are required for viral particle production, infection, and integration. Lentiviral vector production systems typically include four plasmids. In some embodiments, the transfer vector contains the transgene be delivered in a lentiviral backbone containing all of the cis-acting sequences required for genomic RNA production and packaging. Three additional provide the trans-acting factors required for packaging, namely Gag-Pol, Rev-Tat, and the envelope protein VSVG, respectively. When these four plasmids are transfected into 293T human embryonic kidney cells, viral particles accumulate in the supernatant, and the viral product can be concentrated by ultracentrifugation. Lentiviral production protocols are further described in, for example, Tiscornia et al., Nature Protocols, 1: 241-245 (2006); Stevenson, M., Curr. Top. Microbiol. Immunol., 261: 1-30 (2002); Cronin et al., Curr. Gene Ther., 5: 387-398 (2005); Sandrin et al., Curr. Top. Microbiol. Immunol., 281: 137-178 (2003); Zufferey, R., Curr. Top. Microbiol. Immunol., 261: 107-121 (2002); Sinn et al., Gene Ther., 12: 1089-1098 (2005); and Saenz, D. T. and Poeschla, E. M., J. Gene Med., 6: S95-S104 (2004). Other methods for producing lentiviral vectors are known in the art and described in, for example, U.S. Patent Application Publications 2008/0254008 and 2010/0003746; and Yang et al., Hum Gene Ther. Methods, 23(2): 73-83 (2012).

[0618] In some embodiments, the present disclosure provides for a lentiviral vector comprising a nucleotide sequence encoding any one of the polypeptides of Formulas (I), (II), (III), (IV), (V) or a variant or fragment thereof.

[0619] In some embodiments, the lentiviral vector includes a nucleic acid sequence encoding a polypeptide, wherein the polypeptide comprises an amino acid sequence having at least 90% identity to any one of SEQ ID NOS: 1-8, 44-54, 105, and 116-125. In some embodiments, the lentiviral vector includes a nucleic acid sequence encoding a polypeptide, wherein the polypeptide comprises an amino acid sequence having at least 91% identity to any one of SEQ ID NOS: 1-8, 44-54, 105, and 116-125. In some embodiments, the lentiviral vector includes a nucleic acid sequence encoding a polypeptide, wherein the polypeptide comprises an amino acid sequence having at least 92% identity to any one of SEQ ID NOS: 1-8, 44-54, 105, and 116-125. In some embodiments, the lentiviral vector includes a nucleic acid sequence encoding a polypeptide, wherein the polypeptide comprises an amino acid sequence having at least 93% identity to any one of SEQ ID NOS: 1-8, 44-54, 105, and 116-125. In some embodiments, the lentiviral vector includes a nucleic acid sequence encoding a polypeptide, wherein the polypeptide comprises an amino acid sequence having at least 94% identity to any one of SEQ ID NOS: 1-8, 44-54, 105, and 116-125. In some embodiments, the lentiviral vector includes a nucleic acid sequence encoding a polypeptide, wherein the polypeptide comprises an amino acid sequence having at least 95% identity to any one of SEQ ID NOS: 1-8, 44-54, 105, and 116-125. In some embodiments, the lentiviral vector includes a nucleic acid sequence encoding a polypeptide, wherein the polypeptide comprises an amino acid sequence having at least 96% identity to any one of SEQ ID NOS: 1-8, 44-54, 105, and 116-125. In some embodiments, the lentiviral vector includes a nucleic acid sequence encoding a polypeptide having at least 97% identity to any one of SEQ ID NOS: 1-8, 44-54, 105, and 116-125. In some embodiments, the lentiviral vector includes a nucleic acid sequence encoding a polypeptide, wherein the polypeptide comprises an amino acid sequence having at least 98% identity to any one of SEQ ID NOS: 1-8, 44-54, 105, and 116-125. In some embodiments, the lentiviral vector includes a nucleic acid sequence encoding a polypeptide, wherein the polypeptide comprises an amino acid sequence having at least 99% identity to any one of SEQ ID NOS: 1-8, 44-54, 105, and 116-125. In some embodiments, the lentiviral vector includes a nucleic acid sequence encoding a polypeptide, wherein the polypeptide comprises an amino acid sequence having any one of SEQ ID NOS: 1-8, 44-54, 105, and 116-125.

[0620] In some embodiments, the lentiviral vector includes a nucleic acid sequence encoding a polypeptide, wherein nucleic acid sequence encoding the polypeptide has at least 90% identity to any one of SEQ ID NOS: 106, 108-115, and 131. In some embodiments, the lentiviral vector includes a nucleic acid sequence encoding a polypeptide, wherein nucleic acid sequence encoding the polypeptide has at least 91% identity to any one of SEQ ID NOS: 106, 108-115, and 131. In some embodiments, the lentiviral vector includes a nucleic acid sequence encoding a polypeptide, wherein nucleic acid sequence encoding the polypeptide has at least 92% identity to any one of SEQ ID NOS: 106, 108-115, and 131. In some embodiments, the lentiviral vector includes a nucleic acid sequence encoding a polypeptide, wherein nucleic acid sequence encoding the polypeptide has at least 93% identity to any one of SEQ ID NOS: 106, 108-115, and 131. In some embodiments, the lentiviral vector includes a nucleic acid sequence encoding a polypeptide, wherein nucleic acid sequence encoding the polypeptide has at least 94% identity to any one of SEQ ID NOS: 106, 108-115, and 131. In some embodiments, the lentiviral vector includes a nucleic acid sequence encoding a polypeptide, wherein nucleic acid sequence encoding the polypeptide has at least 95% identity to any one of SEQ ID NOS: 106, 108-115, and 131. In some embodiments, the lentiviral vector includes a nucleic acid sequence encoding a polypeptide, wherein nucleic acid sequence encoding the polypeptide has at least 96% identity to any one of SEQ ID NOS: 106, 108-115, and 131. In some embodiments, the lentiviral vector includes a nucleic acid sequence encoding a polypeptide, wherein nucleic acid sequence encoding the polypeptide has at least 97% identity to any one of SEQ ID NOS: 106, 108-115, and 131. In some embodiments, the lentiviral vector includes a nucleic acid sequence encoding a polypeptide, wherein nucleic acid sequence encoding the polypeptide has at least 98% identity to any one of SEQ ID NOS: 106, 108-115, and 131. In some embodiments, the lentiviral vector includes a nucleic acid sequence encoding a polypeptide, wherein nucleic acid sequence encoding the polypeptide has at least 99% identity to any one of SEQ ID NOS: 106, 108-115, and 131. In some embodiments, the lentiviral vector includes a nucleic acid sequence encoding a polypeptide, wherein nucleic acid sequence encoding the polypeptide comprises any one of SEQ ID NOS: 106, 108-115, and 131.

[0621] In some embodiments, the lentiviral expression vector comprises a nucleic acid sequence having at least 80% identity to any one of SEQ ID NOS: 15-26, 55-65, 74, 81, 82, 84-95, 97, and 98. In some embodiments, the lentiviral expression vector comprises a nucleic acid sequence having at least 85% identity to any one of SEQ ID NOS: 15-26, 55-65, 74, 81, 82, 84-95, 97, and 98. In some embodiments, the lentiviral expression vector comprises a nucleic acid sequence having at least 90% identity to any one of SEQ ID NOS: 15-26, 55-65, 74, 81, 82, 84-95, 97, and 98. In some embodiments, the lentiviral expression vector comprises a nucleic acid sequence having at least 91% identity to any one of SEQ ID NOS: 15-26, 55-65, 74, 81, 82, 84-95, 97, and 98. In some embodiments, the lentiviral expression vector comprises a nucleic acid sequence having at least 92% identity to any one of SEQ ID NOS: 15-26, 55-65, 74, 81, 82, 84-95, 97, and 98. In some embodiments, the lentiviral expression vector comprises a nucleic acid sequence having at least 93% identity to any one of SEQ ID NOS: 15-26, 55-65, 74, 81, 82, 84-95, 97, and 98. In some embodiments, the lentiviral expression vector comprises a nucleic acid sequence having at least 94% identity to any one of SEQ ID NOS: 15-26, 55-65, 74, 81, 82, 84-95, 97, and 98. In some embodiments, the lentiviral expression vector comprises a nucleic acid sequence having at least 95% identity to any one of SEQ ID NOS: 15-26, 55-65, 74, 81, 82, 84-95, 97, and 98. In some embodiments, the lentiviral expression vector comprises a nucleic acid sequence having at least 96% identity to any one of SEQ ID NOS: 15-26, 55-65, 74, 81, 82, 84-95, 97, and 98. In some embodiments, the lentiviral expression vector comprises a nucleic acid sequence having at least 97% identity to any one of SEQ ID NOS: 15-26, 55-65, 74, 81, 82, 84-95, 97, and 98. In some embodiments, the lentiviral expression vector comprises a nucleic acid sequence having at least 98% identity to any one of SEQ ID NOS: 15-26, 55-65, 74, 81, 82, 84-95, 97, and 98. In some embodiments, the lentiviral expression vector comprises a nucleic acid sequence having at least 99% identity to any one of SEQ ID NOS: 15-26, 55-65, 74, 81, 82, 84-95, 97, and 98. In some embodiments, the lentiviral expression vector comprises a nucleic acid sequence having any one of SEQ ID NOS: 15-26, 55-65, 74, 81, 82, 84-95, 97, and 98.

[0622] Promoters

[0623] Any promoter utilized in the art may be utilized to drive expression of one or nucleic acid sequences within the expression vectors described herein, e.g. to drive expression of the nucleic acid sequence encoding the polypeptide. In some embodiments, the promoter is one which is functional in mammalian cells. High-level constitutive promoters are preferred for use in the vectors according to the present disclosure. Examples of such promoters include, without limitation, the retroviral Rous sarcoma virus (RSN) LTR promoter (optionally with the RSV enhancer), the cytomegalovirus (CMV) promoter (optionally with the CMV enhancer) [see, e.g., Boshart et al, Cell, 41:521-530 (1985)], the SN40 promoter, the dihydrofolate reductase promoter, the beta-actin promoter, the beta-active promoter linked to the enhancer derived from the cytomegalovirus (CMN) immediate early (IE) promoter, the phosphoglycerol kinase (PGK) promoter, and the EF1a promoter [Invitrogen]. Inducible promoters are regulated by exogenously supplied compounds, including, the zinc-inducible sheep metallothionine (MT) promoter, the dexamethasone (Dex)-inducible mouse mammary tumor virus (MMTV) promoter, the T7 polymerase promoter system [WO 98/10088]; the ecdysone insect promoter [No et al, Proc. Natl. Acad. Sci. USA, 93:3346-3351 (1996)], the tetracycline-repressible system [Gossen et al, Proc. Natl. Acad. Sci. USA, 89:5547-5551 (1992)], the tetracycline-inducible system [Gossen et al, Science, 268:1766-1769 (1995); see also Harvey et al, Curr. Opin. Chem. Biol, 2:512-518 (1998)], the RU486-inducible system [Wang et al, Nat. Biotech., 15:239-243 (1997) and Wang et al, Gene Ther., 4:432-441 (1997)] and the rapamycin-inducible system [Magari et al, J Clin. Invest., 100:2865-2872 (1997)]. Other types of inducible promoters which may be useful in the present disclosure are those which are regulated by a specific physiological state, e.g., temperature, acute phase, a particular differentiation state of the cell, or in replicating cells only.

[0624] Illustrative ubiquitous expression control sequences suitable for use in particular embodiments include, but are not limited to, a cytomegalovirus (CMV) immediate early promoter, a viral simian virus 40 (SV40) (e.g., early or late), a Moloney murine leukemia virus (MoMLV) LTR promoter, a Rous sarcoma virus (RSV) LTR, a herpes simplex virus (HSV) (thymidine kinase) promoter, H5, P7.5, and P11 promoters from vaccinia virus, a short elongation factor 1-alpha (EF1α-short) promoter, a long elongation factor 1-alpha (EF1a-long) promoter, early growth response 1 (EGR1), ferritin H (FerH), ferritin L (FerL), Glyceraldehyde 3-phosphate dehydrogenase (GAPDH), eukaryotic translation initiation factor 4A1 (EIF4A1), heat shock 70 kDa protein 5 (HSPAS), heat shock protein 90 kDa beta, member 1 (HSP90B1), heat shock protein 70 kDa (HSP70), β-kinesin ((3-KIN), the human ROSA 26 locus Orions et al., Nature Biotechnology 25, 1477-1482 (2007)), a Ubiquitin C promoter (UBC), a phosphoglycerate kinase-1 (PGK) promoter, a cytomegalovirus enhancer/chicken β-actin (CAG) promoter, a β-actin promoter and a myeloproliferative sarcoma virus enhancer, negative control region deleted, d1587rev primer-binding site substituted (MND) promoter (Challita et al., J Virol. 69(2):748-55 (1995)).

[0625] In some embodiments, the promoter may be selected from a Cytomegalovirus (CMV) minimal promoter and, more preferably, from human CMV (hCMV) such as the hCMV immediate early promoter derived minimal promoter as described in, e.g., Gossen and Bujard (Proc. Natl. Acad. Sci. USA, 1992, 89: 5547-5551). Modified promoters also may be utilized, including insertion and deletion mutation of native promoters and combinations or permutations thereof. One example of a modified promoter is the “minimal CMV promoter” as described by Gossen and Bujard (Proc. Natl. Acad. Sci. USA, 1992, 89: 5547-5551). In any case, any promoter can be tested readily for its effectiveness in the tetracycline-responsive expression system described herein by substitution for the minimal CMV promoter described herein.

[0626] In some embodiments, the promoter is an MND promoter. In some embodiments, the MND promoter has at least 90% identity to that of SEQ ID NO: 66. In some embodiments, the MND promoter has at least 95% identity to that of SEQ ID NO: 66. In some embodiments, the MND promoter has at least 96% identity to that of SEQ ID NO: 66. In some embodiments, the MND promoter has at least 97% identity to that of SEQ ID NO: 66. In some embodiments, the MND promoter has at least 98% identity to that of SEQ ID NO: 66. In some embodiments, the MND promoter has at least 99% identity to that of SEQ ID NO: 66. In some embodiments, the MND promoter comprises SEQ ID NO: 66.

[0627] In some embodiments, the promoter is an EF1A promoter. In some embodiments, the EF1A promoter has at least 90% identity to any one of SEQ ID NOS: 67 and 100. In some embodiments, the EF1A promoter has at least 95% identity to any one of SEQ ID NOS: 67 and 100. In some embodiments, the EF1A promoter has at least 96% identity to any one of SEQ ID NOS: 67 and 100. In some embodiments, the EF1A promoter has at least 97% identity to any one of SEQ ID NOS: 67 and 100. In some embodiments, the EF1A promoter has at least 98% identity to any one of SEQ ID NOS: 67 and 100. In some embodiments, the EF1A promoter has at least 99% identity to any one of SEQ ID NOS: 67 and 100. In some embodiments, the EF1A promoter comprises SEQ ID NO: 67. In some embodiments, the EF1A promoter comprises SEQ ID NO: 100.

[0628] In some embodiments, the promoter is a CD11b promoter. In some embodiments, the CD11b promoter has at least 90% identity to SEQ ID NO: 96. In some embodiments, the CD11b promoter has at least 95% identity to SEQ ID NO: 96. In some embodiments, the CD11b promoter has at least 96% identity to SEQ ID NO: 96. In some embodiments, the CD11b promoter has at least 97% identity to SEQ ID NO: 96. In some embodiments, the CD11b promoter has at least 98% identity to SEQ ID NO: 96. In some embodiments, the CD11b promoter has at least 99% identity to SEQ ID NO: 96. In some embodiments, the CD11b promoter has SEQ ID NO: 96.

[0629] In some embodiments, the promoter is a EFS promoter. In some embodiments, the EFS promoter has at least 90% identity to SEQ ID NO: 99. In some embodiments, the EFS promoter has at least 95% identity to SEQ ID NO: 99. In some embodiments, the EFS promoter has at least 96% identity to SEQ ID NO: 99. In some embodiments, the EFS promoter has at least 97% identity to SEQ ID NO: 99. In some embodiments, the EFS promoter has at least 98% identity to SEQ ID NO: 99. In some embodiments, the EFS promoter has at least 99% identity to SEQ ID NO: 99. In some embodiments, the EFS promoter has SEQ ID NO: 99.

[0630] In some embodiments, the promoter is a Ubc promoter. In some embodiments, the Ubc promoter has at least 90% identity to SEQ ID NO: 101. In some embodiments, the Ubc promoter has at least 95% identity to SEQ ID NO: 101. In some embodiments, the Ubc promoter has at least 96% identity to SEQ ID NO: 101. In some embodiments, the Ubc promoter has at least 97% identity to SEQ ID NO: 101. In some embodiments, the Ubc promoter has at least 98% identity to SEQ ID NO: 101. In some embodiments, the Ubc promoter has at least 99% identity to SEQ ID NO: 101. In some embodiments, the Ubc promoter has SEQ ID NO: 101.

[0631] In some embodiments, the promoter is a CD68LPp promoter. In some embodiments, the CD68LPp promoter has at least 90% identity to SEQ ID NO: 126. In some embodiments, the CD68LPp promoter has at least 95% identity to SEQ ID NO: 126. In some embodiments, the CD68LPp promoter has at least 96% identity to SEQ ID NO: 126. In some embodiments, the CD68LPp promoter has at least 97% identity to SEQ ID NO: 126. In some embodiments, the CD68LPp promoter has at least 98% identity to SEQ ID NO: 126. In some embodiments, the CD68LPp promoter has at least 99% identity to SEQ ID NO: 126. In some embodiments, the CD68LPp promoter has SEQ ID NO: 99.

[0632] In some embodiments, the promoter is a tissue-specific promoter, where the tissue-specific promoter is used to achieve cell type specific, lineage specific, or tissue-specific expression of a desired polynucleotide sequence (e.g., to express a particular nucleic acid encoding a polypeptide in only a subset of cell types or tissues or during specific stages of development). Illustrative examples of tissue specific promoters include, but are not limited to: an B29 promoter (B cell expression), a runt transcription factor (CBFa2) promoter (stem cell specific expression), an CD14 promoter (monocytic cell expression), an CD43 promoter (leukocyte and platelet expression), an CD45 promoter (hematopoietic cell expression), an CD68 promoter (macrophage expression), a CYP450 3A4 promoter (hepatocyte expression), an desmin promoter (muscle expression), an elastase 1 promoter (pancreatic acinar cell expression, an endoglin promoter (endothelial cell expression), a fibroblast specific protein 1 promoter (FSP1) promoter (fibroblast cell expression), a fibronectin promoter (fibroblast cell expression), a fms-related tyrosine kinase 1 (FLT1) promoter (endothelial cell expression), a glial fibrillary acidic protein (GFAP) promoter (astrocyte expression), an insulin promoter (pancreatic beta cell expression), an integrin, alpha 2b (ITGA2B) promoter (megakaryocytes), an intracellular adhesion molecule 2 (ICAM-2) promoter (endothelial cells), an interferon beta (IFN-β) promoter (hematopoietic cells), a keratin 5 promoter (keratinocyte expression), a myoglobin (MB) promoter (muscle expression), a myogenic differentiation 1 (MYOD1) promoter (muscle expression), a nephrin promoter (podocyte expression), a bone gamma-carboxyglutamate protein 2 (OG-2) promoter (osteoblast expression), an 3-oxoacid CoA transferase 2B (Oxct2B) promoter, (haploid-spermatid expression), a surfactant protein B (SP-B) promoter (lung expression), a synapsin promoter (neuron expression), a Wiskott-Aldrich syndrome protein (WASP) promoter (hematopoietic cell expression).

[0633] In some embodiments, the native promoter for the transgene is utilized. In some embodiments, the native promoter may be preferred when it is desired that expression of the gene should mimic the native expression. In some embodiments, the native promoter may be used when expression of the gene must be regulated temporally or developmentally, or in a tissue-specific manner, or in response to specific transcriptional stimuli. In some embodiments, other native expression control elements, such as enhancer elements, polyadenylation sites or Kozak consensus sequences may also be used to mimic the native expression. In some embodiments, the transgene product or other desirable product to be expressed is operably linked to a tissue-specific promoter. For instance, if expression in skeletal muscle is desired, a promoter active in muscle should be used. These include the promoters from genes encoding skeletal α-actin, myosin light chain 2A, dystrophin, muscle creatine kinase, as well as synthetic muscle promoters with activities higher than naturally-occurring promoters [see Li et al., Nat. Biotech, 17:241-245 (1999)]. Examples of promoters that are tissue-specific are known for liver [albumin, Miyatake et al. J Virol, 71:5124-32 (1997); hepatitis B virus core promoter, Sandig et al, Gene Ther., 3:1002-9 (1996); and alpha-fetoprotein (AFP), Arbuthnot et al, Hum. Gene Ther, 7:1503-14 (1996)], bone [osteocalcin, Stein et al, Mol. Biol. Rep., 24:185-96 (1997); and bone sialoprotein, Chen et al, J Bone Miner. Res., 11:654-64 (1996)], lymphocytes [CD2, Hansal et al., J Immunol, 161:1063-8 (1998); immunoglobulin heavy chain; T cell receptor a chain], neuronal [neuron-specific enolase (NSE) promoter, Andersen et al. Cell. Mol. Neurobiol, 13:503-15 (1993); neurofilament light-chain gene, Piccioli et al., 1991, Proc. Natl. Acad. Sci. USA, 88:5611-5 (1991); and the neuron-specific vgf gene, Piccioli et al, Neuron 15:373-84 (1995)]; among others.

[0634] In some embodiments, the lentiviral vector includes a first nucleic acid sequence operably linked to an EF1A promoter, wherein the first nucleic acid sequence encodes for a polypeptide having any one of Formulas (I)-(V).

[0635] In some embodiments, the lentiviral vector includes a first nucleic acid sequence operably linked to an EF1A promoter, wherein the first nucleic acid sequence encodes a polypeptide having at least 90% identity to any one of SEQ ID NOS: 1-8, 44-54, 68, 75, 105, and 116-125. In some embodiments, the lentiviral vector includes a first nucleic acid sequence operably linked to an EF1A promoter, wherein the first nucleic acid sequence encodes a polypeptide having at least 91% identity to any one of SEQ ID NOS: 1-8, 44-54, 68, 75, 105, and 116-125. In some embodiments, the lentiviral vector includes a first nucleic acid sequence operably linked to an EF1A promoter, wherein the first nucleic acid sequence encodes a polypeptide having at least 92% identity to any one of SEQ ID NOS: 1-8, 44-54, 68, 75, 105, and 116-125. In some embodiments, the lentiviral vector includes a first nucleic acid sequence operably linked to an EF1A promoter, wherein the first nucleic acid sequence encodes a polypeptide having at least 93% identity to any one of SEQ ID NOS: 1-8, 44-54, 68, 75, 105, and 116-125. In some embodiments, the lentiviral vector includes a first nucleic acid sequence operably linked to an EF1A promoter, wherein the first nucleic acid sequence encodes a polypeptide having at least 94% identity to any one of SEQ ID NOS: 1-8, 44-54, 68, 75, 105, and 116-125. In some embodiments, the lentiviral vector includes a first nucleic acid sequence operably linked to an EF1A promoter, wherein the first nucleic acid sequence encodes a polypeptide having at least 95% identity to any one of SEQ ID NOS: 1-8, 44-54, 68, 75, 105, and 116-125. In some embodiments, the lentiviral vector includes a first nucleic acid sequence operably linked to an EF1A promoter, wherein the first nucleic acid sequence encodes a polypeptide having at least 96% identity to any one of SEQ ID NOS: 1-8, 44-54, 68, 75, 105, and 116-125. In some embodiments, the lentiviral vector includes a first nucleic acid sequence operably linked to an EF1A promoter, wherein the first nucleic acid sequence encodes a polypeptide having at least 97% identity to any one of SEQ ID NOS: 1-8, 44-54, 68, 75, 105, and 116-125. In some embodiments, the lentiviral vector includes a first nucleic acid sequence operably linked to an EF1A promoter, wherein the first nucleic acid sequence encodes a polypeptide having at least 98% identity to any one of SEQ ID NOS: 1-8, 44-54, 68, 75, 105, and 116-125. In some embodiments, the lentiviral vector includes a first nucleic acid sequence operably linked to an EF1A promoter, wherein the first nucleic acid sequence encodes a polypeptide having at least 99% identity to any one of SEQ ID NOS: 1-8, 44-54, 68, 75, 105, AND 116-125. In some embodiments, the lentiviral vector includes a first nucleic acid sequence operably linked to an EF1A promoter, wherein the first nucleic acid sequence encodes a polypeptide having any one of SEQ ID NOS: 1-8, 44-54, 68, 75, 105, and 116-125.

[0636] In some embodiments, the lentiviral vector includes a first nucleic acid sequence operably linked to an MND promoter, wherein the first nucleic acid sequence encodes for a polypeptide having any one of Formulas (I)-(V).

[0637] In some embodiments, the lentiviral vector includes a first nucleic acid sequence operably linked to an MND promoter, wherein the first nucleic acid sequence encodes for a polypeptide having at least 90% identity to any one of SEQ ID NOS: 1-8, 44-54, 68, 75, 105, and 116-125. In some embodiments, the lentiviral vector includes a first nucleic acid sequence operably linked to an MND promoter, wherein the first nucleic acid sequence encodes a polypeptide having at least 91% identity to any one of SEQ ID NOS: 1-8, 44-54, 68, 75, 105, and 116-125. In some embodiments, the lentiviral vector includes a first nucleic acid sequence operably linked to an MND promoter, wherein the first nucleic acid sequence encodes a polypeptide having at least 92% identity to any one of SEQ ID NOS: 1-8, 44-54, 68, 75, 105, and 116-125. In some embodiments, the lentiviral vector includes a first nucleic acid sequence operably linked to an MND promoter, wherein the first nucleic acid sequence encodes a polypeptide having at least 93% identity to any one of SEQ ID NOS: 1-8, 44-54, 68, 75, 105, and 116-125. In some embodiments, the lentiviral vector includes a first nucleic acid sequence operably linked to an MND promoter, wherein the first nucleic acid sequence encodes a polypeptide having at least 94% identity to any one of SEQ ID NOS: 1-8, 44-54, 68, 75, 105, and 116-125. In some embodiments, the lentiviral vector includes a first nucleic acid sequence operably linked to an MND promoter, wherein the first nucleic acid sequence encodes a polypeptide having at least 95% identity to any one of SEQ ID NOS: 1-8, 44-54, 68, 75, 105, and 116-125. In some embodiments, the lentiviral vector includes a first nucleic acid sequence operably linked to an MND promoter, wherein the first nucleic acid sequence encodes a polypeptide having at least 96% identity to any one of SEQ ID NOS: 1-8, 44-54, 68, 75, 105, and 116-125. In some embodiments, the lentiviral vector includes a first nucleic acid sequence operably linked to an MND promoter, wherein the first nucleic acid sequence encodes a polypeptide having at least 97% identity to any one of SEQ ID NOS: 1-8, 44-54, 68, 75, 105, and 116-125. In some embodiments, the lentiviral vector includes a first nucleic acid sequence operably linked to an MND promoter, wherein the first nucleic acid sequence encodes a polypeptide having at least 98% identity to any one of SEQ ID NOS: 1-8, 44-54, 68, 75, 105, and 116-125. In some embodiments, the lentiviral vector includes a first nucleic acid sequence operably linked to an MND promoter, wherein the first nucleic acid sequence encodes a polypeptide having at least 99% identity to any one of SEQ ID NOS: 1-8, 44-54, 68, 75, 105, and 116-125. In some embodiments, the lentiviral vector includes a first nucleic acid sequence operably linked to an MND promoter, wherein the first nucleic acid sequence encodes a polypeptide having any one of SEQ ID NOS: 1-8, 44-54, 68, 75, 105, and 116-125.

[0638] In some embodiments, the lentiviral vector includes a first nucleic acid sequence operably linked to an CD11b promoter, wherein the first nucleic acid sequence encodes for a polypeptide having any one of Formulas (I)-(V).

[0639] In some embodiments, the lentiviral vector includes a first nucleic acid sequence operably linked to an CD11b promoter, wherein the first nucleic acid sequence encodes for a polypeptide having at least 90% identity to any one of SEQ ID NOS: 1-8, 44-54, 68, 75, 105, and 116-125. In some embodiments, the lentiviral vector includes a first nucleic acid sequence operably linked to an CD11b promoter, wherein the first nucleic acid sequence encodes a polypeptide having at least 91% identity to any one of SEQ ID NOS: 1-8, 44-54, 68, 75, 105, and 116-125. In some embodiments, the lentiviral vector includes a first nucleic acid sequence operably linked to an CD11b promoter, wherein the first nucleic acid sequence encodes a polypeptide having at least 92% identity to any one of SEQ ID NOS: 1-8, 44-54, 68, 75, 105, and 116-125. In some embodiments, the lentiviral vector includes a first nucleic acid sequence operably linked to an CD11b promoter, wherein the first nucleic acid sequence encodes a polypeptide having at least 93% identity to any one of SEQ ID NOS: 1-8, 44-54, 68, 75, 105, and 116-125. In some embodiments, the lentiviral vector includes a first nucleic acid sequence operably linked to an CD11b promoter, wherein the first nucleic acid sequence encodes a polypeptide having at least 94% identity to any one of SEQ ID NOS: 1-8, 44-54, 68, 75, 105, and 116-125. In some embodiments, the lentiviral vector includes a first nucleic acid sequence operably linked to an CD11b promoter, wherein the first nucleic acid sequence encodes a polypeptide having at least 95% identity to any one of SEQ ID NOS: 1-8, 44-54, 68, 75, 105, and 116-125. In some embodiments, the lentiviral vector includes a first nucleic acid sequence operably linked to an CD11b promoter, wherein the first nucleic acid sequence encodes a polypeptide having at least 96% identity to any one of SEQ ID NOS: 1-8, 44-54, 68, 75, 105, and 116-125. In some embodiments, the lentiviral vector includes a first nucleic acid sequence operably linked to an CD11b promoter, wherein the first nucleic acid sequence encodes a polypeptide having at least 97% identity to any one of SEQ ID NOS: 1-8, 44-54, 68, 75, 105, and 116-125. In some embodiments, the lentiviral vector includes a first nucleic acid sequence operably linked to an CD11b promoter, wherein the first nucleic acid sequence encodes a polypeptide having at least 98% identity to any one of SEQ ID NOS: 1-8, 44-54, 68, 75, 105, and 116-125. In some embodiments, the lentiviral vector includes a first nucleic acid sequence operably linked to an CD11b promoter, wherein the first nucleic acid sequence encodes a polypeptide having at least 99% identity to any one of SEQ ID NOS: 1-8, 44-54, 68, 75, 105, and 116-125. In some embodiments, the lentiviral vector includes a first nucleic acid sequence operably linked to an CD11b promoter, wherein the first nucleic acid sequence encodes a polypeptide having any one of SEQ ID NOS: 1-8, 44-54, 68, 75, 105, and 116-125.

[0640] In some embodiments, the lentiviral vector includes a first nucleic acid sequence operably linked to an EFS promoter, wherein the first nucleic acid sequence encodes for a polypeptide having any one of Formulas (I)-(V).

[0641] In some embodiments, the lentiviral vector includes a first nucleic acid sequence operably linked to an EFS promoter, wherein the first nucleic acid sequence encodes for a polypeptide having at least 90% identity to any one of SEQ ID NOS: 1-8, 44-54, 68, 75, 105, and 116-125. In some embodiments, the lentiviral vector includes a first nucleic acid sequence operably linked to an EFS promoter, wherein the first nucleic acid sequence encodes a polypeptide having at least 91% identity to any one of SEQ ID NOS: 1-8, 44-54, 68, 75, 105, and 116-125. In some embodiments, the lentiviral vector includes a first nucleic acid sequence operably linked to an EFS promoter, wherein the first nucleic acid sequence encodes a polypeptide having at least 92% identity to any one of SEQ ID NOS: 1-8, 44-54, 68, 75, 105, and 116-125. In some embodiments, the lentiviral vector includes a first nucleic acid sequence operably linked to an EFS promoter, wherein the first nucleic acid sequence encodes a polypeptide having at least 93% identity to any one of SEQ ID NOS: 1-8, 44-54, 68, 75, 105, and 116-125. In some embodiments, the lentiviral vector includes a first nucleic acid sequence operably linked to an EFS promoter, wherein the first nucleic acid sequence encodes a polypeptide having at least 94% identity to any one of SEQ ID NOS: 1-8, 44-54, 68, 75, 105, and 116-125. In some embodiments, the lentiviral vector includes a first nucleic acid sequence operably linked to an EFS promoter, wherein the first nucleic acid sequence encodes a polypeptide having at least 95% identity to any one of SEQ ID NOS: 1-8, 44-54, 68, 75, 105, and 116-125. In some embodiments, the lentiviral vector includes a first nucleic acid sequence operably linked to an EFS promoter, wherein the first nucleic acid sequence encodes a polypeptide having at least 96% identity to any one of SEQ ID NOS: 1-8, 44-54, 68, 75, 105, and 116-125. In some embodiments, the lentiviral vector includes a first nucleic acid sequence operably linked to an EFS promoter, wherein the first nucleic acid sequence encodes a polypeptide having at least 97% identity to any one of SEQ ID NOS: 1-8, 44-54, 68, 75, 105, and 116-125. In some embodiments, the lentiviral vector includes a first nucleic acid sequence operably linked to an EFS promoter, wherein the first nucleic acid sequence encodes a polypeptide having at least 98% identity to any one of SEQ ID NOS: 1-8, 44-54, 68, 75, 105, and 116-125. In some embodiments, the lentiviral vector includes a first nucleic acid sequence operably linked to an EFS promoter, wherein the first nucleic acid sequence encodes a polypeptide having at least 99% identity to any one of SEQ ID NOS: 1-8, 44-54, 68, 75, 105, and 116-125. In some embodiments, the lentiviral vector includes a first nucleic acid sequence operably linked to an EFS promoter, wherein the first nucleic acid sequence encodes a polypeptide having any one of SEQ ID NOS: 1-8, 44-54, 68, 75, 105, and 116-125.

[0642] In some embodiments, the lentiviral vector includes a first nucleic acid sequence operably linked to an Ubc promoter, wherein the first nucleic acid sequence encodes for a polypeptide having any one of Formulas (I)-(V).

[0643] In some embodiments, the lentiviral vector includes a first nucleic acid sequence operably linked to an Ubc promoter, wherein the first nucleic acid sequence encodes for a polypeptide having at least 90% identity to any one of SEQ ID NOS: 1-8, 44-54, 68, 75, 105, and 116-125. In some embodiments, the lentiviral vector includes a first nucleic acid sequence operably linked to an Ubc promoter, wherein the first nucleic acid sequence encodes a polypeptide having at least 91% identity to any one of SEQ ID NOS: 1-8, 44-54, 68, 75, 105, and 116-125. In some embodiments, the lentiviral vector includes a first nucleic acid sequence operably linked to an Ubc promoter, wherein the first nucleic acid sequence encodes a polypeptide having at least 92% identity to any one of SEQ ID NOS: 1-8, 44-54, 68, 75, 105, and 116-125. In some embodiments, the lentiviral vector includes a first nucleic acid sequence operably linked to an Ubc promoter, wherein the first nucleic acid sequence encodes a polypeptide having at least 93% identity to any one of SEQ ID NOS: 1-8, 44-54, 68, 75, 105, and 116-125. In some embodiments, the lentiviral vector includes a first nucleic acid sequence operably linked to an Ubc promoter, wherein the first nucleic acid sequence encodes a polypeptide having at least 94% identity to any one of SEQ ID NOS: 1-8, 44-54, 68, 75, 105, and 116-125. In some embodiments, the lentiviral vector includes a first nucleic acid sequence operably linked to an Ubc promoter, wherein the first nucleic acid sequence encodes a polypeptide having at least 95% identity to any one of SEQ ID NOS: 1-8, 44-54, 68, 75, 105, and 116-125. In some embodiments, the lentiviral vector includes a first nucleic acid sequence operably linked to an Ubc promoter, wherein the first nucleic acid sequence encodes a polypeptide having at least 96% identity to any one of SEQ ID NOS: 1-8, 44-54, 68, 75, 105, and 116-125. In some embodiments, the lentiviral vector includes a first nucleic acid sequence operably linked to an Ubc promoter, wherein the first nucleic acid sequence encodes a polypeptide having at least 97% identity to any one of SEQ ID NOS: 1-8, 44-54, 68, 75, 105, and 116-125. In some embodiments, the lentiviral vector includes a first nucleic acid sequence operably linked to an Ubc promoter, wherein the first nucleic acid sequence encodes a polypeptide having at least 98% identity to any one of SEQ ID NOS: 1-8, 44-54, 68, 75, 105, and 116-125. In some embodiments, the lentiviral vector includes a first nucleic acid sequence operably linked to an Ubc promoter, wherein the first nucleic acid sequence encodes a polypeptide having at least 99% identity to any one of SEQ ID NOS: 1-8, 44-54, 68, 75, 105, and 116-125. In some embodiments, the lentiviral vector includes a first nucleic acid sequence operably linked to an Ubc promoter, wherein the first nucleic acid sequence encodes a polypeptide having any one of SEQ ID NOS: 1-8, 44-54, 68, 75, 105, and 116-125.

[0644] In some embodiments, the lentiviral vector includes a first nucleic acid sequence operably linked to an CD68LPp promoter, wherein the first nucleic acid sequence encodes for a polypeptide having any one of Formulas (I)-(V).

[0645] In some embodiments, the lentiviral vector includes a first nucleic acid sequence operably linked to an CD68LPp promoter, wherein the first nucleic acid sequence encodes for a polypeptide having at least 90% identity to any one of SEQ ID NOS: 1-8, 44-54, 68, 75, 105, and 116-125. In some embodiments, the lentiviral vector includes a first nucleic acid sequence operably linked to an CD68LPp promoter, wherein the first nucleic acid sequence encodes a polypeptide having at least 91% identity to any one of SEQ ID NOS: 1-8, 44-54, 68, 75, 105, and 116-125. In some embodiments, the lentiviral vector includes a first nucleic acid sequence operably linked to an CD68LPp promoter, wherein the first nucleic acid sequence encodes a polypeptide having at least 92% identity to any one of SEQ ID NOS: 1-8, 44-54, 68, 75, 105, and 116-125. In some embodiments, the lentiviral vector includes a first nucleic acid sequence operably linked to an CD68LPp promoter, wherein the first nucleic acid sequence encodes a polypeptide having at least 93% identity to any one of SEQ ID NOS: 1-8, 44-54, 68, 75, 105, and 116-125. In some embodiments, the lentiviral vector includes a first nucleic acid sequence operably linked to an CD68LPp promoter, wherein the first nucleic acid sequence encodes a polypeptide having at least 94% identity to any one of SEQ ID NOS: 1-8, 44-54, 68, 75, 105, and 116-125. In some embodiments, the lentiviral vector includes a first nucleic acid sequence operably linked to an CD68LPp promoter, wherein the first nucleic acid sequence encodes a polypeptide having at least 95% identity to any one of SEQ ID NOS: 1-8, 44-54, 68, 75, 105, and 116-125. In some embodiments, the lentiviral vector includes a first nucleic acid sequence operably linked to an CD68LPp promoter, wherein the first nucleic acid sequence encodes a polypeptide having at least 96% identity to any one of SEQ ID NOS: 1-8, 44-54, 68, 75, 105, and 116-125. In some embodiments, the lentiviral vector includes a first nucleic acid sequence operably linked to an CD68LPp promoter, wherein the first nucleic acid sequence encodes a polypeptide having at least 97% identity to any one of SEQ ID NOS: 1-8, 44-54, 68, 75, 105, and 116-125. In some embodiments, the lentiviral vector includes a first nucleic acid sequence operably linked to an CD68LPp promoter, wherein the first nucleic acid sequence encodes a polypeptide having at least 98% identity to any one of SEQ ID NOS: 1-8, 44-54, 68, 75, 105, and 116-125. In some embodiments, the lentiviral vector includes a first nucleic acid sequence operably linked to an CD68LPp promoter, wherein the first nucleic acid sequence encodes a polypeptide having at least 99% identity to any one of SEQ ID NOS: 1-8, 44-54, 68, 75, 105, and 116-125. In some embodiments, the lentiviral vector includes a first nucleic acid sequence operably linked to an CD68LPp promoter, wherein the first nucleic acid sequence encodes a polypeptide having any one of SEQ ID NOS: 1-8, 44-54, 68, 75, 105, and 116-125.

[0646] Transcription may be increased by inserting an enhancer sequence into the vector(s). Enhancers are typically cis-acting elements of DNA, usually about 10 to 300 bp in length, that act on a promoter to increase its transcription. Many enhancer sequences are now known from mammalian genes (globin, elastase, albumin, alpha-fetoprotein, and insulin) and from eukaryotic cell viruses. Examples include the SV40 enhancer on the late side of the replication origin (bp 100-270), the cytomegalovirus early promoter enhancer, the polyoma enhancer on the late side of the replication origin, and adenovirus enhancers. The enhancer may be spliced into the vector at a position 5′ or 3′ to the antigen-specific polynucleotide sequence but is preferably located at a site 5′ from the promoter.

[0647] In some embodiments, the vectors of the present disclosure include an insulator element, e.g., a cHS insulator. In some embodiments, the insulator has a nucleotide sequencing having at least 95% identity to any one of SEQ ID NOS: 127-129. In some embodiments, the insulator has a nucleotide sequencing having at least 97% identity to any one of SEQ ID NOS: 127-129. In some embodiments, the insulator has a nucleotide sequencing having at least 99% identity to any one of SEQ ID NOS: 127-129. In some embodiments, the insulator has a nucleotide sequencing having any one of SEQ ID NOS: 127-129.

[0648] Production of Viral Particles

[0649] Any of a variety of methods already known in the art may be used to produce infectious lentiviral particles whose genome comprises an RNA copy of the viral vector genome. In one method, the viral vector genome is introduced into a packaging cell line that contains all the components necessary to package viral genomic RNA, transcribed from the viral vector genome, into viral particles. Alternatively, the viral vector genome may comprise one or more genes encoding viral components in addition to the one or more sequences of interest. In order to prevent replication of the genome in the target cell, however, endogenous viral genes required for replication will usually be removed and provided separately in the packaging cell line.

[0650] In general, the lentiviral vector particles are produced by a cell line that is transfected with one or more plasmid vectors containing the components necessary to generate the particles. These lentiviral vector particles are typically not replication-competent, i.e., they are only capable of a single round of infection. Most often, multiple plasmid vectors are utilized to separate the various genetic components that generate the lentiviral vector particles, mainly to reduce the chance of recombination events that might otherwise generate replication competent viruses. A single plasmid vector having all of the lentiviral components can be used if desired, however. As one example of a system that employs multiple plasmid vectors, a cell line is transfected with at least one plasmid containing the viral vector genome (i.e., the vector genome plasmid), including the LTRs, the cis-acting packaging sequence, and the sequence(s) of interest, which are often operably linked to a heterologous promoter, at least one plasmid encoding the virus enzymatic and structural components (i.e., the packaging plasmid that encodes components such as Gag and Pol), and at least one envelope plasmid encoding an Arbovirus envelope glycoprotein. Additional plasmids can be used to enhance retrovirus particle production, e.g., Rev-expression plasmids, as described herein and known in the art. Viral particles bud through the cell membrane and comprise a core that includes a genome containing the sequence of interest and an Arbovirus envelope glycoprotein that targets dendritic cells. When the Arbovirus glycoprotein is Sindbis virus E2 glycoprotein, the glycoprotein is engineered to have reduced binding to heparan sulfate compared to the reference strain HR.

[0651] Transfection of packaging cells with plasmid vectors can be accomplished by well-known methods, and the method to be used is not limited in any way. A number of non-viral delivery systems are known in the art, including for example, electroporation, lipid-based delivery systems including liposomes, delivery of “naked” DNA, and delivery using polycyclodextrin compounds, such as those described in Schatzlein A. G. (2001, Non-Viral Vectors in Cancer Gene Therapy: Principles and Progresses. Anticancer Drugs, which is incorporated herein by reference in its entirety). Cationic lipid or salt treatment methods are typically employed, see, for example. Graham et al. (1973, Virol. 52:456; Wigler et al.; 1979, Proc. Natl. Acad. Sci. USA 76:1373-76), each of the foregoing which is incorporated herein by reference in its entirety. The calcium phosphate precipitation method is most often used. However, other methods for introducing the vector into cells may also be used, including nuclear microinjection and bacterial protoplast fusion.

[0652] The packaging cell line provides the components, including viral regulatory and structural proteins, that are required in trans for the packaging of the viral genomic RNA into lentiviral vector particles. The packaging cell line may be any cell line that is capable of expressing lentiviral proteins and producing functional lentiviral vector particles. Some suitable packaging cell lines include 293 (ATCC CCL X), 293T, HeLa (ATCC CCL 2), D17 (ATCC CCL 183), MDCK (ATCC CCL 34), BHK (ATCC CCL-10) and Cf2Th (ATCC CRL 1430) cells. The packaging cell line may stably express the necessary viral proteins. Such a packaging cell line is described, for example, in U.S. Pat. No. 6,218,181, which is incorporated herein by reference in its entirety. Alternatively a packaging cell line may be transiently transfected with nucleic acid molecules encoding one or more necessary viral proteins along with the viral vector genome. The resulting viral particles are collected and used to infect a target cell. The gene(s) encoding envelope glycoprotein(s) is usually cloned into an expression vector, such as pcDNA3 (Invitrogen, CA USA). Eukaryotic cell expression vectors are well known in the art and are available from a number of commercial sources. Packaging cells, such as 293T cells are then co-transfected with the viral vector genome encoding a sequence of interest (typically encoding an antigen), at least one plasmid encoding virus packing components, and a vector for expression of the targeting molecule. The envelope is expressed on the membrane of the packaging cell and incorporated into the viral vector.

[0653] Compositions Comprising a Polynucleotide

[0654] Another aspect of the present disclosure is directed to compositions comprising one or more of the polynucleotides having any one of Formulas (I), (II), (III), (IV), (V) or a variant or fragment thereof. For example, the composition may comprise a polypeptide having an amino acid sequence having at least 90% identity (e.g., 91% identity, 92% identity, 93% identity, 94% identity, 95% identity, 96% identity, 97% identity, 98% identity, 99% identity) to any one of SEQ ID NOS: 2-8, 44-54, 68, 75, 105, and 116-125. In some embodiments, the composition may comprise a polypeptide having an amino acid sequence having any one of SEQ ID NOS: 2-8, 44-54, 68, 75, 105, and 116-125.

[0655] In some embodiments, the composition further comprises a physiologically acceptable carrier, excipient, or stabilizer. See, e.g., Remington's Pharmaceutical Sciences (1990) Mack Publishing Co., Easton, Pa. Acceptable carriers, excipients, or stabilizers can include those that are nontoxic to a subject. In some embodiments, the composition or one or more components of the composition are sterile. A sterile component can be prepared, for example, by filtration (e.g., by a sterile filtration membrane) or by irradiation (e.g., by gamma irradiation).

[0656] Suitable compositions include aqueous and non-aqueous isotonic sterile solutions, which can contain anti-oxidants, buffers, and bacteriostats, and aqueous and non-aqueous sterile suspensions that can include suspending agents, solubilizers, thickening agents, stabilizers, and preservatives. The composition can be presented in unit-dose or multi-dose sealed containers, such as ampules and vials, and can be stored in a freeze-dried (lyophilized) condition requiring only the addition of the sterile liquid carrier, for example, water, immediately prior to use. Extemporaneous solutions and suspensions can be prepared from sterile powders, granules, and tablets. Preferably, the carrier is a buffered saline solution. In some embodiments, the lentiviral vector is part of a composition formulated to protect the lentiviral vector from damage prior to administration. For example, the composition can be formulated to reduce loss of the lentiviral vector on devices used to prepare, store, or administer lentiviral vector, such as glassware, syringes, or needles. In some embodiments, the composition can be formulated to decrease the light sensitivity and/or temperature sensitivity of lentiviral vector. To this end, the composition preferably comprises a pharmaceutically acceptable liquid carrier, such as, for example, those described above, and a stabilizing agent selected from the group consisting of polysorbate 80, L-arginine, polyvinylpyrrolidone, trehalose, and combinations thereof. Use of such a composition will extend the shelf life of the lentiviral vector and facilitate its administration. Formulations for lentiviral-containing compositions are further described in, for example, Ausubel et al., Bioprocess Int., 10(2): 32-43 (2012), U.S. Pat. No. 7,575,924, and International Patent Application Publication WO 2013/139300.

[0657] The compositions comprising the one or more polypeptides of any one of Formulas (I), (II), (III), (IV), and (V) may be administered to humans or other animals on whose tissues they are effective in various manners such as topically, orally, intravenously, intramuscularly, intraperitoneally, intranasally, intradermally, intrathecally, subcutaneously, intraocularly, via inhalation, or via suppository. In one example, the compounds are administered to the subject subcutaneously. In another example, the compounds are administered to the subject intravenously.

[0658] Compositions Comprising an Expression Vector

[0659] Another aspect of the present disclosure is directed to compositions comprising one or more expression vectors, e.g., an expression vector having at least 95%, 96%, 97%, 98%, or 99% identity to any one of SEQ ID NOS: 15-26, 55-65, 74, 81, 82, 84-95, 97, and 98. In some embodiments, the present disclosure provides a composition comprising one or more of the expression vectors described herein and a carrier therefor (e.g., a pharmaceutically acceptable carrier). The composition desirably is a physiologically acceptable (e.g., pharmaceutically acceptable) composition, which comprises a carrier, e.g. a physiologically (e.g., pharmaceutically) acceptable carrier, and the lentiviral vector. Any suitable carrier can be used within the context of the present disclosure, and such carriers are well known in the art, including any of those described above.

[0660] Host Cells

[0661] The present disclosure is also directed to a method of producing a recombinant polypeptide, comprising: culturing an isolated host cell as described herein and isolating the recombinant polypeptide from the host cell. Techniques for isolating polypeptides from cultured host cells can be any technique known to be used or routinely modified when isolating polypeptides from the host cell selected for expression and will be apparent to the ordinarily skilled artisan. Suitable host cells are those cell types that can be transformed or transfected with exogenous DNA and grown in culture, and include bacteria, fungal cells, and cultured higher eukaryotic cells (including cultured cells of multicellular organisms), particularly cultured mammalian cells. Techniques for manipulating cloned DNA molecules and introducing exogenous DNA into a variety of host cells are disclosed by Sambrook and Russell, Molecular Cloning: A Laboratory Manual (3rd ed., Cold Spring Harbor Laboratory Press, Cold Spring Harbor, N.Y., 2001), and Ausubel et al., Short Protocols in Molecular Biology (4th ed., John Wiley & Sons, 1999). For example, the recombinant polypeptides of the present disclosure may be expressed from bacterial Escherichia coli cells.

[0662] Cultured mammalian cells can be suitable hosts for production of recombinant polypeptides for use within the present disclosure. Methods for introducing exogenous DNA into mammalian host cells include calcium phosphate-mediated transfection (Wigler et al., Cell 14:725, 1978; Corsaro and Pearson, Somatic Cell Genetics 7:603, 1981: Graham and Van der Eb, Virology 52:456, 1973), electroporation (Neumann et al., EMBO J. 1:841-845, 1982), DEAE-dextran mediated transfection (Ausubel et al., supra), and liposome-mediated transfection (Hawley-Nelson et al., Focus 15:73, 1993; Ciccarone et al., Focus 15:80, 1993). The production of recombinant polypeptides in cultured mammalian cells is disclosed by, for example, Levinson et al., U.S. Pat. No. 4,713,339; Hagen et al., U.S. Pat. No. 4,784,950; Palmiter et al., U.S. Pat. No. 4,579,821; and Ringold, U.S. Pat. No. 4,656,134. Examples of suitable mammalian host cells include African green monkey kidney cells (Vero; ATCC CRL 1587), human embryonic kidney cells (293-HEK; ATCC CRL 1573), baby hamster kidney cells (BHK-21, BHK-570; ATCC CRL 8544, ATCC CRL 10314), canine kidney cells (MDCK; ATCC CCL 34), Chinese hamster ovary cells (CHO-Kl; ATCC CCL61; CHO DG44; CHO DXB11 (Hyclone, Logan, Utah); see also, e.g., Chasin et al., Som. Cell. Molec. Genet. 12:555, 1986)), rat pituitary cells (GH1; ATCC CCL82), HeLa S3 cells (ATCC CCL2.2), rat hepatoma cells (H-4-II-E; ATCC CRL 1548) SV40-transformed monkey kidney cells (COS-1; ATCC CRL 1650) and murine embryonic cells (NIH-3T3; ATCC CRL 1658). Additional suitable cell lines are known in the art and available from public depositories such as the American Type Culture Collection, Manassas, Va. Strong transcription promoters can be used, such as promoters from SV-40 or cytomegalovirus. See, e.g., U.S. Pat. No. 4,956,288. Other suitable promoters include those from metallothionein genes (U.S. Pat. Nos. 4,579,821 and 4,601,978) and the adenovirus major late promoter.

[0663] The present disclosure also provides a host cell (or a population of host cells) transduced with any one of the expression vectors (e.g., lentiviral expression vectors) or composition comprising any one of the expression vectors described herein. For instance, the host cells may be transduced with an expression vector according to any of the embodiments described herein, e.g., an expression vector having at least 95%, 96%, 97%, 98%, or 99% identity to any one of SEQ ID NOS: 15-26, 55-65, 74, 81, 82, 84-95, 97, and 98. In some embodiments, the host cells are transduced with an expression vector to express any one of the polypeptides described herein, e.g., a polypeptide having an amino acid sequence having at least 90% identity (e.g., 91% identity, 92% identity, 93% identity, 94% identity, 95% identity, 96% identity, 97% identity, 98% identity, 99% identity) to any one of SEQ IF NOS: 2-8, 44-54, 68, 75, 105, and 116-125.

[0664] In some embodiments, host cells are those that can be easily and reliably grown, have reasonably fast growth rates, have well characterized expression systems, and can be transformed, transfected, or transduced easily and efficiently with the lentiviral vectors of the present disclosure. The host cell can be any suitable eukaryotic cell known in the art including, for example, yeast cells, insect cells, and mammalian cells. In some embodiments, mammalian cells are utilized in the present disclosure. In one embodiment, the host cells are packaging cells used for producing lentiviral vector particles, including, for example, 293T cells (ATCC No. CRL-3216) and HT1080 cells (ATCC No. CCL-121).

[0665] In some embodiments, the host cell is a hematopoietic stem cell or a progenitor cell produced or derived therefrom (including but not limited to cells in the blood such as granulocytes/neutrophils, lymphocytes, erythrocytes, megakaryocytes/platelets, and monocytes/macrophages; HSPC-derived tissue-resident cells such as dendritic cells, Kupffer cells, microglia, and osteoclasts). Hematopoietic stem cells (HSCs) are multipotent, self-renewing progenitor cells that develop from mesodermal hemangioblast cells. All differentiated blood cells (i.e., myelocytes, lymphocytes, erythrocytes, and platelets) arise from HSCs. HSCs can be found in adult bone marrow, peripheral blood, and umbilical cord blood. In another embodiment, the host cell is a cell that expresses the CD34 protein, which is also referred to as a “CD34+” cell. CD34 is a cell surface glycoprotein that functions as a cell-cell adhesion factor and may also mediate the attachment of stem cells to bone marrow extracellular matrix or directly to stromal cells. CD34 is a marker for primitive blood- and bone marrow-derived progenitor cells, especially for HSCs.

[0666] In some embodiments, the host cell is a mesenchymal stem cell. Mesenchymal stem cells are multipotent adult stem cells that are present in multiple tissues, including umbilical cord, bone marrow and fat tissue. Mesenchymal stem cells can self-renew by dividing and can differentiate into multiple tissues including bone, cartilage, muscle and fat cells, and connective tissue.

[0667] In some embodiments, the host cells are bone marrow cells. In some embodiments, the host cells are hepatocytes. In some embodiments, the host cells are endothelial cells.

[0668] The methods of the present disclosure may be used in gene therapy approaches, in treatments for either genetic or acquired diseases. The general approach of gene therapy involves the introduction of nucleic acid into cells such that one or more gene products encoded by the introduced genetic material are produced in the cells to restore or enhance a functional activity. For reviews on gene therapy approaches see Anderson, W. F. (1992) Science 256:808-813; Miller, A. D. (1992) Nature 357:455-460; Friedmann, T. (1989) Science 244:1275-1281; and Cournoyer, D., et al. (1990) Curr. Opin. Biotech. 1:196-208). Cells types which can be modified for gene therapy purposes include hematopoietic stem cells, myoblasts, hepatocytes, lymphocytes, skin epithelium and airway epithelium. For further descriptions of cell types, genes and methods for gene therapy see e.g., Wilson, J. M et al. (1988) Proc. Natl Acad. Sci. USA 85:3014-3018; Armentano, D. et al. (1990) Proc. Natl Acad. Sci. USA 87:6141-6145; Wolff, J. A. et al. (1990) Science 247:1465-1468; Chowdhury, J. R. et al. (1991) Science 254:1802-1805; Ferry, N. et al (1991) Proc. Natl Acad. Sci. USA 88:8377-8381; Wilson, J. M. et al. (1992) J. Biol Chem. 267:963-967; Quantin, B. et al (1992) Proc. Natl. Acad. Sci. USA 89:2581-2584; Dai, Y. et al. (1992) Proc. Natl Acad. Sci. USA 89:10892-10895; van Beusechem, V. W. et al. (1992) Proc. Natl. Acad. Sci. USA 89:7640-7644; Rosenfeld, M. A. et al. (1992) Cell 68:143-155; Kay, M. A. et al. (1992) Human Gene Therapy 3:641-647; Cristiano, R. J. et al. (1993) Proc. Natl. Acad. Sci. USA 90:2122-2126; Hwu, P. et al. (1993) J. Immunol. 150:4104-4115; and Herz, J. and Gerard, R. D. (1993) Proc. Natl. Acad. Sci. USA 90:2812-2816.

[0669] Methods of Treatment

[0670] Another aspect of the present disclosure is directed to a method of treating hypophosphatasia in a mammal, e.g. a human, in need thereof. Another aspect of the present disclosure is directed to a method of treating, mitigating, or preventing a symptom of hypophosphatasia in a mammal, e.g. a human. In some embodiments, the present disclosure is directed to treating a condition or disease related to a bone defect characterized by a lack of or an insufficient amount of functional alkaline phosphatase.

[0671] In some embodiments, the method comprises (a) harvesting hematopoietic stem cells from the mammal, (b) transducing the hematopoietic stein cells with an expression vector (e.g., a lentiviral expression vector) or a composition comprising an expression vector, and (c) transplanting the transduced hematopoietic stem cells into in the mammal. In some embodiments, the expression vector comprises at least 95%, 96%, 97%, 98%, or 99% identity to any one of SEQ ID NOS: 15-26, 55-65, 74, 81, 82, 84-95, 97, and 98. In some embodiments, the lentiviral vector comprises a nucleic acid sequence encoding a polypeptide, such as any of the polypeptides having Formulas (I), (II), (III), (IV), and (V), e.g., a polypeptide having an amino acid sequence having at least 90% identity (e.g., 91% identity, 92% identity, 93% identity, 94% identity, 95% identity, 96% identity, 97% identity, 98% identity, 99% identity) to any one of SEQ IDS NOS: 1-8, 44-54, 68, 75, 105, and 116-125.

[0672] Hematopoietic stem cells can be harvested from bone marrow, peripheral blood, or umbilical cord blood of the mammal (e.g., a human) using methods known in the art, such as those described in, for example, Wognum et al., Arch Med Res., 34(6): 461-75 (2003); Ng et al., Methods Mol. Biol., 506: 13-21 (2009); Weissman and Shizuru, Blood, 112(9): 3543-3553 (2008); Frisch and Calvi, Skeletal Development and Repair Methods in Molecular Biology, 1130: 315-324 (2014); and U.S. Pat. No. 8,383,404. For example, HSCs can be harvested from the pelvis, at the iliac crest, using a needle and syringe. Alternatively, HSCs can be isolated from circulating peripheral blood by injecting the mammal (or allogeneic donor) with a cytokine, such as granulocyte-colony stimulating factor (G-CSF), that induce cells to leave the bone marrow and circulate in the blood vessels.

[0673] In some embodiments, the harvested HSCs can be “autologous” or “allogeneic.” In some embodiments, autologous HSCs are removed from a mammal, stored (and optionally modified), and returned back to the same mammal. In some embodiments, allogeneic HSCs are removed from a mammal, stored (and optionally modified), and transplanted into a genetically similar, but not identical, recipient. In some embodiments, the cells are autologous to the mammal.

[0674] The expression vector or composition comprising the expression vector of the present disclosure may be introduced into a hematopoietic cell by “transfection,” “transformation,” or “transduction.” The terms “transfection,” “transformation,” or “transduction,” as used herein, refer to the introduction of one or more exogenous polynucleotides into a host cell by using physical or chemical methods. Many transfection techniques are known in the art and include, for example, calcium phosphate DNA co-precipitation (see, e.g., Murray E. J. (ed.), Methods in Molecular Biology, Vol. 7, Gene Transfer and Expression Protocols, Humana Press (1991)); DEAE-dextran; electroporation; cationic liposome-mediated transfection; tungsten particle-facilitated microparticle bombardment (Johnston, Nature, 346: 776-777 (1990)); and strontium phosphate DNA co-precipitation (Brash et al., Mol. Cell Biol., 7: 2031-2034 (1987)). Lentiviral vectors typically are introduced into host cells after growth of infectious particles in suitable packaging cells.

[0675] The HSCs may be transduced with the expression vector ex vivo, in vivo or in vitro, depending on the ultimate application. In some embodiments, the HSCs are transduced in vitro with the expression vector or composition comprising the expression vector followed by infusion of the transduced stem cells into the mammal. In this embodiment, the human stem cell can be removed from a human patient using methods well known to in the art and transduced as described above. In some embodiments, the transduced HSCs are then reintroduced into the same (autologous) or different mammal (allogeneic). In some embodiments, the HSCs are transduced ex vivo.

[0676] In some embodiments, the methods of the present disclosure comprise transplanting the HSCs into a mammal in need thereof. Hematopoietic stem cell transplantation (HSCT) has become the standard of care for many patients with certain congenital or acquired disorders of the hematopoietic system or with chemosensitive, radiosensitive, or immunosensitive malignancies (see, e.g., Gratwohl et al., JAMA, 303(16): 1617-1624 (2010); and Copelan, E. A., NEJM, 354: 1813-1826 (2006)). Methods of isolating stem cells from a subject, transducing them with a therapeutic gene (e.g., an anti-sickling human (3-globin gene), and returning the modified stem cells to the subject are well known in the art (see, e.g., Pawliuk et al., Science, 294(5550): 2368-2371 (2001); Tyndall et al., Bone Marrow Transplant, 24 (7): 729-34 (1999); and Burt et al., JAMA, 299 (8): 925-36 (2008)). Other methods for transplanting HSCs into a subject in need thereof that can be used in the method described herein include those used, for example, for bone marrow transplantation or peripheral blood stem cell transplantation.

[0677] In some embodiments, the hematopoietic stem cells can be transduced with the expression vector in vivo by directly injecting into a mammal in need thereof the aforementioned composition comprising the lentiviral vector and a carrier therefor (e.g., a pharmaceutically acceptable carrier). In some embodiments, the composition comprising the expression vector can be administered to a mammal using standard administration techniques (e.g. parenteral administration). The term “parenteral,” as used herein, includes intravenous, intramuscular, subcutaneous, rectal, vaginal, and intraperitoneal administration. In some embodiments, the composition is administered to a mammal using peripheral systemic delivery by intravenous, intraperitoneal, or subcutaneous injection.

[0678] In some embodiments, the methods of the present disclosure provide for the treatment of hypophosphatasia in the mammal. As used herein, the terms “treatment,” “treating,” and the like refer to obtaining a desired pharmacologic and/or physiologic effect. In some embodiments, the effect is therapeutic, i.e., the effect partially or completely cures a disease and/or adverse symptom attributable to the disease. In some embodiments, a “therapeutically effective amount” of the transduced HSCs or the composition comprising the expression vector are administered to the subject tin need of treatment thereof. A “therapeutically effective amount” refers to an amount effective, at dosages and for periods of time necessary, to achieve a desired therapeutic result.

[0679] In some embodiments, the therapeutically effective amount may vary according to factors such as the disease state, age, sex, and weight of the individual, and the ability of the transduced HSC's and encoded protein or variant thereof to elicit a desired response in the individual. For example, in some embodiments a therapeutically effective amount of transduced HSCs of the present disclosure is an amount which results in expression of a polypeptide having any one of Formulas (I), (II), (III), (IV), or (V) or a variant or fragment thereof at levels that ameliorates or reverses hypophosphatasia in a human.

[0680] The dose of lentiviral vector delivered to hematopoietic stem cells, either by in vitro or in vivo methods, typically can be, for example, a multiplicity of infection (MOI) in the range of 1 to 100 (e.g., 1, 5, 10, 15, 20, 25, 30, 35, 40, 45, 50, 55, 60, 65, 70, 75, 80, 85, 90, 95, 100 MOI, or a range defined by any two of the forgoing values); however, doses below or above this exemplary range are within the scope of the present disclosure.

[0681] In some embodiments, the lentiviral vector particles are in a dose of 1×106 TU, 2×106 TU, 3×106 TU, 4×106 TU, 5×106 TU, 6×106 TU, 7×106 TU, 8×106 TU, 9×106, 1×107 TU, 2×107 TU, 3×107 TU, 4×107 TU, 5×107 TU, 6×107 TU, 7′107 TU, 8×107 TU, 9×107 TU, 1×108 TU, 2×108 TU, 3×108 TU, 4×108 TU, 5×108 TU, 6×108 TU, 7×108 TU, 8×108 TU, 9×108 TU, or 1×109 TU. In some embodiments, the lentiviral vector particles are in a dose of from 1×106 TU to 5×106 TU, from 5×106 TU to 1×107 TU, from 1×107 TU to 5×107 TU, from 5×107 TU to 1×108 TU, from 1×108 TU to 5×108 TU, or from 5×108 TU to 1×109 TU.

[0682] In some embodiments, the pharmacologic and/or physiologic effect may be prophylactic, i.e., the effect completely or partially prevents a disease or symptom thereof. In this respect, the present disclosures provides a method of treatment which comprises administering a “prophylactically effective amount” of the transduced HSCs or the composition comprising one or more of the expression vectors described herein. A “prophylactically effective amount” refers to an amount effective, at dosages and for periods of time necessary, to achieve a desired prophylactic result (e.g., prevention of disease onset).

[0683] Therapeutic or prophylactic efficacy can be monitored by periodic assessment of treated patients. For repeated administrations over several days or longer, depending on the condition, the treatment can be repeated until a desired suppression of disease symptoms occurs. In some embodiments, the desired dosage can be delivered by a single bolus administration of the composition or by multiple bolus administrations of the composition.

[0684] In some embodiments, transduced HSCs or the composition comprising one or more of the expression vectors described herein may be provided to a mammal alone or in combination with other drugs (e.g., as an adjuvant). For example, the transduced HSCs or the composition comprising the expression vector can be administered in combination with other agents for the treatment or prevention of hypophosphatasia. For example, transduced HSCs may be provided to a subject in need of treatment thereof, and wherein the subject is concurrently being treated with a recombinant alkaline phosphatase, such as Asfotase alfa, available from Alexion Pharmaceuticals, Inc. Alternatively, the transduced HSCs may be provided to a subject in need of treatment thereof, and wherein the subject was previously treated with a recombinant alkaline phosphatase or will be treated in the future with an alkaline phosphatase, such as Asfotase alfa, available from Alexion Pharmaceuticals, Inc.

[0685] Alternatively, the transduced HSCs can be administered in combination with other agents that reduce or prevent one or more complications associated with HSC transplantation. Such complications include, for example, infections, sepsis, mucositis, and graft-versus-host-disease (GVHD). In this respect, the transduced HSCs can be used in combination with antiviral agents, anticoagulants (e.g., defibrotide), ursodeoxycholic acid, and/or corticosteroids (e.g., prednisone). some

[0686] In particular embodiments, patients receive a dose of transduced hematopoietic stem cells of about 1×10⁵ cells/kg, about 5×10⁵ cells/kg, about 1×10⁶ cells/kg, about 2×10⁶ cells/kg, about 3×10⁶ cells/kg, about 4×10⁶ cells/kg, about 5×10⁶ cells/kg, about 6×10⁶ cells/kg, about 7×10⁶ cells/kg, about 8×10⁶ cells/kg, about 9×10⁶ cells/kg, about 1×10⁷ cells/kg, about 5×10⁷ cells/kg, about 1×10⁸ cells/kg, or more in one single intravenous dose. In a certain embodiment, patients receive a dose of transduced hematopoietic stem cells of about 1×10⁵ cells/kg to about 1×10⁸ cells/kg, about 1×10⁶ cells/kg to about 1×10⁸ cells/kg, about 1×10⁶ cells/kg to about 9×10⁶ cells/kg, about 2×10⁶ cells/kg to about 8×10⁶ cells/kg, about 2×10⁶ cells/kg to about 8×10⁶ cells/kg, about 2×10⁶ cells/kg to about 5×10⁶ cells/kg, about 3×10⁶ cells/kg to about 5×10⁶ cells/kg, about 3×10⁶ cells/kg to about 4×10⁸ cells/kg, or any intervening dose of cells/kg.

[0687] Transduced cells can be stimulated with cytokines for expansion using existing methods in the art. In various embodiments, subjects are administered 1, 2, 3, 4, 5, or more doses over days, months, or years, as needed to maintain or increase the therapy.

### Examples

### Example 1—Cell Mineralization Inhibition/Rescue Experiment for the Polypeptide Having SEQ ID NO: 5

[0688] Cell culture—Mouse calvarial pre-osteoblasts MC3T3-E1 cells (subclone 14) were used for these experiments, since they show robust mineralization associated with extracellular matrix production and assembly, similar to bone in vivo. Many other osteoblast cell culture systems mineralize dystrophically, without properly elaborating and assembling an extracellular matrix.

[0689] Cultures were maintained and cultured in minimum essential medium (MEM) (Gibco) supplemented with 10% fetal bovine serum (FBS) (Hyclone), 1% penicillin-streptomycin and 2 mM L-Glutamine (Gibco) at 37° C. in a humidified atmosphere of 5% CO₂. Cells were plated at 50,000 cells per cm 2 and differentiation into mature osteoblasts was induced after 24 h of adhesion (day 0) by adding 50 μg/ml ascorbic acid (AA) (Sigma) to facilitate collagen secretion and assembly, and 10 mM β-glycerophosphate ((3GP) (Sigma) to facilitate mineralization in providing an organic phosphate source. The differentiation medium was changed every 48 h.

[0690] Cell proliferation (MTT)—Cell proliferation and viability was tested in the presence of various concentrations of the polypeptide having SEQ ID NO: 5, by analyzing MTT (344,5-dimethyl-2-thiazolyl)-2,5-diphenyl-2H-tetrazolium bromide) (Sigma) incorporation into viable cells. Briefly, plated cells in 96 well plate were incubated with 0.25 mg/ml MTT solution for 3 h at 37° C. After incubation, precipitate was dissolved in DMSO. Spectrophotometric measurements were done using 562 nm wavelength in a microplate reader.

[0691] As measured by the MTT assay, there was no toxic effect of the polypeptide having SEQ ID NO: 5 to the cells even at the highest concentration (10 U/ml).

[0692] To document a potential mineralization inhibition/rescue a cell culture was initiated in differentiation medium (including AA and (3GP). At day 4, various concentrations of the polypeptide having SEQ ID NO: 5 were tested, namely 0.1, 0.3, and 1.0 unit/ml to the culture medium with or without mineralization inhibitor sodium pyrophosphate tetrabasic (PPi) at a concentration of 2.5 μM for the remainder of culture period (10 days) (see FIG. 10)

[0693] Mineral was visualized by von Kossa staining at day 10. Cells were fixed with 95% ethanol for 10 min at 37° C. After hydrated the cells with d.H2O, cells were incubated with 5% silver nitrate solution (Sigma) for an hour at 37° C. Cells were washed with d.H2O an exposed to bright light for an hour at room temperature.

[0694] Insoluble calcium deposited into the extracellular matrix (ECM) was first dissolved in 0.5 M HCl for 1 h at 4° C. with gentle shaking. The calcium concentration in the supernatant was determined colorimetrically (wavelength 595 nm) using a calcium assay kit (Sekisui Diagnostics) at day 10 (see FIG. 11).

[0695] The polypeptide having SEQ ID NO: 5 rescued the PPi induced inhibition of cell mineralization even at the lowest concentration (0.1 U/ml). A dose range effect on deposited calcium concentration showing maximum effect at 1.0 U/mL.

[0696] Collagen matrix deposition was quantified by Picrosirius Red staining (Direct Red 80, Sigma), followed by dissolving the stain using 0.1 N NaOH (Fisher). Collagen type 1 from rat tail (Sigma) was used as a standard to generate standard curve. Spectrophotometric measurement was done using 562 nm wavelength.

### Example 2—In Vitro Hydroxyapatite Binding Assay for the Polypeptides Having SEQ ID NOS: 2 and 5

[0697] Untagged polypeptide having SEQ ID NO: 2 and tagged polypeptide having SEQ ID NO: 5 were subjected to pulldown assay (supernatant depletion by mineral) as follows: Hydroxyapatite crystal solution (Berkeley, 5 μM) (HA) was prepared in 20 mM Tris (pH 7.4); 150 mM NaCl and allowed to equilibrate overnight at room temperature with gentle agitation. The next day, untagged polypeptide having SEQ ID NO: 2 and tagged polypeptide having SEQ ID NO: 5 were incubated with, or without, 0.3 mg HA at different concentration 0.5, 1.0, 5.0, 10.0 and 15.0 μg/ml and allowed to bind for one hour at room temperature on a shaker. Tubes were spun down at 10,000×g for 5 min, and the supernatant was used to measure the alkaline phosphatase level for each sample. A standard colorimetric method where alkaline phosphatase is used as a standard (Sigma) and p-nitrophenylphosphate (Sigma) as a phosphatase substrate, turns yellow when dephosphorylated by alkaline phosphatase, and was measured at 405 nm wavelength. Results in FIG. 12 show strong preferential binding of the tagged polypeptide having SEQ ID NO: 5 over its non-tagged counterpart.

### Example 3—Secreted TNALP Activity for DNA Constructs Having SEQ ID Nos: 19 and 55)

[0698] Cell culture—293T cells were maintained and cultured in Dublbeco's minimum essential medium (DMEM) (Gibco) supplemented with 10% fetal bovine serum (FBS) (Gibco), 1% penicillin-streptomycin and 2 mM L-Glutamine (Gibco) at 37° C. in a humidified atmosphere of 5% CO₂. 4e6 of 293T cells were plated in 50 mm cell culture dish the day before transfection.

[0699] Transfection with calcium phosphate—Calcium phosphate kit (Clonetech) was used to introduce DNA constructs having SEQ ID Nos: 19, 25 and 55 into cultured 293 cells. Mixed 0.5 μg of plasmid DNAs from different constructs with 2M calcium solution; then vortexed it with the same volume of HEPES-Buffered Saline (HBS). Incubated 10 minutes before applying transfection solution to cell culture.

[0700] Secreted TNALP activity assay—1-10 uL of supernatant from transfected 293 cells were taken out and put into 96-well plate. A standard colorimetric method where alkaline phosphatase is used as a standard (Abcam) and p-nitrophenylphosphate (pNPP) (Abcam) as a phosphatase substrate, turns yellow when dephosphorylated by alkaline phosphatase, and was measured at 405 nm wavelength for 20 minutes at 37° C. in a microplate reader. TNALP activity (U/L) in the test samples was calculated based on the hydrolysis of one micromole of pNPP per minute at pH 9.6 and 25° C. (glycine buffer).

[0701] EF1a-promoter-driven TNALP DNA construct having SEQ ID No: 19 and EF1a promoter-driven TNALP DNA construct with IgG2H secretion signal peptide having SEQ ID No: 55 were transfected into 293t cells then the supernatant of cell culture was subjected to secreted TNALP assay. Results in FIG. 13 show the construct with secretion signal peptide of IgG2H has more than 6-fold of secreted TNALP activity compared with two constructs having the original secretion signal peptide with EF1a promoter and MND promoter.

### Example 4—Pharmacokinetics Study

[0702] Introduction

[0703] The objective of the study was to determine and compare the profile of 8 soluble recombinant forms (or constructs) of the tissue-nonspecific alkaline phosphatase (RMP-001 to RMP-008, corresponding to SEQ ID NOS: 1-8), following a single intravenous injection to the CD 1 mouse. The constructs are meant to be secreted by transduced cells after injection of recombinant lentiviral vectors into hypophosphatasia (HPP) patients as a potential novel gene therapy. To fulfil their therapeutic activity, the constructs have to be secreted from transduced cells and distribute into bones and various other organs at levels compatible with target tissue efficacy, while maintaining an adequate systemic safety profile. It has been hypothesized that systemic exposure and bone distribution should be similar to those found after repeated sub-cutaneous injections of Asfotase alfa, an enzyme replacement therapy currently approved for the treatment of perinatal/infantile and juvenile-onset HPP. Critical parameters to be established in this pharmacokinetic study are thus the systemic exposure (measured by the area under the curve) and half-life of each of the construct, both parameters to be compared to those Asfotase alfa. Any construct that would be cleared to rapidly would be disqualified from future development plan. This pharmacokinetic study would thus serve as a first screening step, which should be followed by a biodistribution study where the efficacy for each of the compound to home-in to bonne tissue would be assessed.

[0704] Study Plan

[0705] The test and control items were planned to be administered to groups of mice on a single occasion by slow bolus intravenous injection (over 30 to 60 seconds) as described in the table below.

TABLE 1
Study design.

| | | Dose | Dose | Dose | Number |
|---|---|---|---|---|---|
| Group | Group | Level | Concentration | Volume | of Male |
| Number | Designation | (mg/kg) | (mg/mL) | (ml/kg) | Animals |
| 1 | Control* | 0 | 0 | 2.5 | 3 |
| 2 | RMP-001 | 5 | 2 | 2.5 | 24 |
| | (SEQ ID | | | | |
| | NO: 1) | | | | |
| 3 | RMP-002 | 5 | 2 | 2.5 | 24 |
| | (SEQ ID | | | | |
| | NO: 2) | | | | |
| 4 | RMP-003 | 5 | 2 | 2.5 | 24 |
| | (SEQ ID | | | | |
| | NO: 3) | | | | |
| 5 | RMP-004 | 5 | 2 | 2.5 | 24 |
| | (SEQ ID | | | | |
| | NO: 4) | | | | |
| 6 | RMP-005 | 5 | 2 | 2.5 | 24 |
| | (SEQ ID | | | | |
| | NO: 5) | | | | |
| 7 | RMP-006 | 5 | 2 | 2.5 | 24 |
| | (SEQ ID | | | | |
| | NO: 6) | | | | |
| 8 | RMP-007 | 5 | 2 | 2.5 | 24 |
| | (SEQ ID | | | | |
| | NO: 7) | | | | |
| 9 | RMP-008 | 5 | 2 | 2.5 | 24 |
| | (SEQ ID | | | | |
| | NO: 8) | | | | |

*Control animals were administered with Phosphate Buffered Saline (PBS) alone.

[0706] A series of blood samples were collected at the following timepoints relative to dosing: 5, 15, and 30 minutes, and 2, 12, 24, 48 and 72 hours (post dose). Serum was collected and analyzed for ALP concentrations and the subsequent calculation of pharmacokinetic parameters. Following collection of the blood sample, each animal was euthanized and discarded without further examination.

[0707] Dose level was selected as it was close to the daily dose previously shown as well tolerated and fully efficacious for preventing bone defect in a hypophosphatasia mouse model (Millan et al. J. Bone Mineral Res. 2008, 23: 777-787.).

[0708] In a previous pharmacokinetic study, single intravenous administration of RMP-001 at a dose of 10 mg/kg in male CD-1 mice was well tolerated and did not result to signs of overt toxicity. In this study, the highest serum Alkaline Phosphatase (ALP) concentrations would be generally noted at 5 minutes post dosing.

Test Item Information
Characterization of Test and Control Items

| | | |
|---|---|---|
| Test item 1 | Identity: | RMP-001 in PBS 100 mM |
| | | L-arginine pH 7.2 |
| | Alternative Name: | Asfotase alfa |
| Test item 2 | Identity: | RMP-002 in 50 mM Tris pH 8, |
| | | 300 mM NaCl, 300 mM Imidazole |
| | Alternative Name: | sTNSALP |
| Test item 3 | Identity: | RMP-003 in 50 mM Tris pH 8, |
| | | 300 mM NaCl, 300 mM Imidazole |
| | Alternative Name: | sTNSALP-D10 |
| Test item 4 | Identity: | RMP-004 in 50 mM Tris pH 8, |
| | | 300 mM NaCl, 300 mM Imidazole |
| | Alternative Name: | sTNSALP-GSlinker-D10 |
| Test item 5 | Identity: | RMP-005 in 50 mM Tris pH 8, |
| | | 300 mM NaCl, 300 mM Imidazole |
| | Alternative Name: | sTNSALP-(DSS)6 |
| Test item 6 | Identity: | RMP-006 in 50 mM Tris pH 8, |
| | | 300 mM NaCl, 300 mM Imidazole |
| | Alternative Name: | sTNSALP-GSlinker-(DSS)6 |
| Test item 7 | Identity: | RMP-007 in 50 mM Tris pH 8, |
| | | 300 mM NaCl, 300 mM Imidazole |
| | Alternative Name: | STNSALP-VAR-D10 |
| Test item 8 | Identity: | RMP-008 in 50 mM Tris pH 8, |
| | | 300 mM NaCl, 300 mM Imidazole |
| | Alternative Name: | sTNSALP-VAR-(DSS)6 |
| Control item: | Identity: | Phosphate Buffered Saline (PBS) |

[0709] The test items forms were provided as pre-formulated solutions that were ready for use or for dilution and were received in 2 batches.

TABLE 2
Group dosing

| 1^{st} Batch | | | 2^{nd} Batch | | |
|---|---|---|---|---|---|
| Group | Test | Storage | Group | Test | Storage |
| dosed | Item | condition | dosed | Item | condition |
| 2 | RMP-001 | ≤−60° C. | 2 | RMP-001 | 2 to 8° C. |
| | | | 3 | RMP-002 | |
| | | | 4 | RMP-003 | |
| 5 | RMP-004 | | 5 | RMP-004 | |
| | | | 6 | RMP-005 | |
| | | | 7 | RMP-006 | |
| | | | 8 | RMP-007 | |
| | | | 9 | RMP-008 | |

[0710] On the day of dosing, the 1st batch of test items was removed from the freezer and was thawed at room temperature; the second batch of test items was removed from storage (2 to 8° C.) for dilution or use. The control item was removed from storage (2 to 8° C.) and was used for the dilution of the appropriate test items.

[0711] Following complete thawing or removal from storage:

[0712] Test Item 3 was used as it was received at a concentration of 2 mg/mL for dosing of animals in Group 4.

[0713] Test Items 1, 2, 4, 5, 6, 7, and 8 were diluted by adding the appropriate volume of the control item (PBS), to reach a final concentration of 2 mg/mL for each dose group.

[0714] Remaining test items not used were kept refrigerated at 2 to 8° C.

[0715] Dosing formulations intended for Groups 2 to 9 were administered within 3 to 4 hours following complete thawing and/or dilution.

[0716] Analysis of Test Item Formulations

[0717] Analysis of Achieved Concentration

[0718] In order to verify the concentration of the test item in the formulations (diluted to 2 mg/mL), representative samples (0.5 mL in duplicate were taken from the middle of each concentration (except Group 3 formulations, since there was no dilution) intended for dosing on Day 1.

[0719] Due to insufficient volumes, the second batch of undiluted test item received (RMP-001, RMP-002, RMP-003, RMP-004, RMP-005, RMP-006, RMP-007, RMP-008) (corresponding to SEQ ID NOS: 1-8, respectively) were not analyzed.

[0720] Samples were stored frozen (≤−60° C.) until transfer to ITR Immunology Department. Analysis of formulation samples were performed by ITR using an analytical UV A280 method.

[0721] As shown in the Table below, the concentrations of the original RMP-002, RMP-003, RMP-004, RMP-005, RMP-006, RMP-007 and RMP-008 measured by the Bradford method were on the average roughly 2 times higher than the concentrations measured by UV absorbance.

TABLE 3
Concentration values in formulation and stock solutions.

| | Nominal | Measured | Expected | | Corrected |
|---|---|---|---|---|---|
| | concentration | concentration | concentration | | concentration |
| Sample | (mg/mL) in | (mg/mL) in | (mg/mL) in | % | (mg/mL) in |
| ID | stock solution | formulation | formulation | Accuracy | stock solution |
| RMP-001 | 4.1 | 1.874 | 2 | 93.7 | 3.84 |
| RMP-002 | 2.5 | 1.017 | 2 | 50.9 | 1.27 |
| RMP-003 | 2 | * | * | * | * |
| RMP-004 | 2.5 | 1.037 | 2 | 51.9 | 1.30 |
| RMP-005 | 2.8 | 1.195 | 2 | 59.8 | 1.67 |
| RMP-006 | 3.5 | 1.068 | 2 | 53.4 | 1.87 |
| RMP-007 | 3.8 | 1.136 | 2 | 56.8 | 2.16 |
| RMP-008 | 2.8 | 0.886 | 2 | 44.3 | 1.24 |

Notes:
% Accuracy = (Conc. measured/Expected Conc) × 100.
* sample not collected for dose formulation analysis due to insufficient volume

[0722] The enzymatic activities of all the test articles were measured in a Hitachi Automatic Analyzer c311 using the same conditions as the ones used for clinical samples. Activities are measured in International Units (IU). Based on the concentrations obtained by measuring the UV absorbance, the specific activities in IU/mg were then computed. Results are presented in Table 4 below.

TABLE 4
Specific activities expressed in IU measured at ITR. RMP-001
(ref.) is the first batch received on Nov. 14, 2019 and kept
frozen until the analysis on Mar. 20, 2020. RMP-001* is the
batch received on Nov. 14, 2019 thawed, kept at 4-8° C.
until the analysis and used as a reference standard for all the
enzymatic assays during the PK study. RMP-001 is the batch
received on Mar. 2, 2020 and used for the formulation of the
test item used for dosing the animals during the PK study. No
value is available for RMP-003 as there was not enough
material left for the analysis. All the concentration values
used in computing the specific activities were obtained by
UV absorbance reading at 280 nm.

| | RMP- | RMP- | | | | | | | |
|---|---|---|---|---|---|---|---|---|---|
| | 001 | 001 | Dose | Dose | Dose | Dose | Dose | Dose | Dose |
| | received | received | formu- | formu- | formu- | formu- | formu- | formu- | formu- |
| | on | on | lation | lation | lation | lation | lation | lation | lation |
| | 14-11- | 20-02- | RMP- | RMP- | RMP- | RMP- | RMP- | RMP- | RMP- |
| | 19* | 20 | 001 | 002 | 004 | 005 | 006 | 007 | 008 |
| Sample | 12928.0 | 12419.0 | 5156.0 | 1018.0 | 4571.0 | 8562.0 | 8942.0 | 10174.0 | 5959.0 |
| activity | | | | | | | | | |
| measured | | | | | | | | | |
| (U/L) | | | | | | | | | |
| Dilution factor | 100.0 | 100.0 | 100.0 | 100.0 | 100.0 | 100.0 | 100.0 | 100.0 | 100.0 |
| in PBS 1X | | | | | | | | | |
| Activity × | 1292800.0 | 1241900.0 | 515600.0 | 101800.0 | 457100.0 | 856200.0 | 894200.0 | 1017400.0 | 595900.0 |
| Dilution (U/L) | | | | | | | | | |
| Activity | 1292.8 | 1241.9 | 515.6 | 101.8 | 457.1 | 856.2 | 894.2 | 1017.4 | 595.9 |
| (U/mL) | | | | | | | | | |
| Nominal | 4.1 | 4.1 | 2.0 | 2.0 | 2.0 | 2.0 | 2.0 | 2.0 | 2.0 |
| sample conc. | | | | | | | | | |
| (mg/mL) | | | | | | | | | |
| Measured | 4.1 | 4.1 | 1.9 | 1.0 | 1.0 | 1.2 | 1.1 | 1.1 | 0.9 |
| conc (UV | | | | | | | | | |
| A280). | | | | | | | | | |
| Sample spec. | 315.3 | 302.9 | 275.1 | 100.1 | 440.8 | 716.5 | 837.3 | 895.6 | 672.6 |
| activity | | | | | | | | | |
| (U/mg) | | | | | | | | | |
| Sp act. ratio | 1.000 | 1.041 | 1.146 | 3.150 | 0.715 | 0.440 | 0.377 | 0.352 | 0.469 |
| (RMP1*/ | | | | | | | | | |
| RMPX) | | | | | | | | | |

[0723] Analysis of Homogeneity

[0724] The two RMP-001 samples received had been purified from crude CHO supernatant cultures by protein-A capture followed by preparative Size Exclusion Chromatography (SEC) and analyzed by SEC-HPLC in native conditions. They were shown to be more than 98% pure with no contamination from aggregates. RMP-002 to RMP-008 test items contained a His-tag extension at the C-terminus that allowed purification on a Ni-Sepharose column by the UCLA core lab. They were analyzed by SDS-PAGE conditions in reducing and non-reducing conditions but were not submitted to SEC-HPLC analysis. As conditions for SDS-PAGE might have resulted in solubilizing any aggregates present in the crude spent culture supernatant, it is currently unknown whether test items received from the UCLA core lab might be contaminated by aggregates. It is indeed known that recombinant soluble tissue-nonspecific ALP has a tendency to form aggregates.

[0725] Analysis of Stability

[0726] The stability of formulations under the conditions of use and/or storage on the study including sufficient room temperature stability to cover the period of dosing and the concentrations used on the study were estimated from previous experience with this kind of enzyme. A more rigorous approach to stability testing should have been performed by periodically measuring the specific activity of all test items and the presence of aggregates or fragments in native conditions using techniques such as SEC-HPLC or nephelometry.

[0727] Administration of the Test and Control items

[0728] The test and control items were administered once by slow bolus intravenous injection (over 30 to 60 seconds) into the tail vein with a hypodermic needle attached to a syringe. The dose volume for each dose group was 2.5 mL/kg, including controls. The actual volume administered to each mouse was calculated and adjusted based on the most recent practical body weight of each animal.

[0729] The dosing formulations for Groups 2 to 9 were administered to all respective animals within 3 to 4 hours following complete thawing and/or dilution.

[0730] Remaining test and control item formulations following each dosing were discarded.

[0731] In-Life Observations

[0732] Clinical Observations

[0733] For all animals, cage-side clinical signs (ill health, behavioral changes, etc.) were recorded at least once daily during all phases of the study, except on detailed clinical examination (DCE) days, where the cage-side clinical signs were replaced by a DCE.

[0734] A DCE of each mouse was performed once at arrival as part of the health status evaluation and on Day −1.

[0735] Body Weights

[0736] Body weights were recorded for all animals as per health status section and then at least once prior to group assignment. Body weights were also recorded for all animals on Day −1.

[0737] Pharmacokinetics

[0738] Sample Collection, Processing and Bioanalysis

[0739] A series of blood samples (approximately 0.5 mL) were collected from 3 mice/timepoint (except for Group 1, where blood samples were collected at one time point) on Day 1 post dose as indicated in Table 5 below.

TABLE 5
Design of the pharmacokinetic post dose sample collection

| | Number | Pharmacokinetic time point Post Dose | | | | | | | |
|---|---|---|---|---|---|---|---|---|---|
| Group | of | 5 | 15 | 30 | 2 | 12 | 24 | 48 | 72 |
| number | animals | min | min | min | hr | hr | hr | hr | hr |
| 1 | 3 | | | √ | | | | | |
| 2 to 9 | 3* | √ | | | | | | | |
| | 3* | | √ | | | | | | |
| | 3* | | | √ | | | | | |
| | 3* | | | | √ | | | | |
| | 3* | | | | | √ | | | |
| | 3* | | | | | | √ | | |
| | 3* | | | | | | | √ | |
| | 3* | | | | | | | | √ |

[0740] For this purpose, each animal was anesthetized with Isoflurane to allow blood sample collection and were bled via cardiac puncture.

[0741] Following its last blood sampling, each animal was euthanized by exsanguination and discarded without further examination.

[0742] Following collection, blood samples for serum were allowed to stand at room temperature for approximately 30 minutes to clot and then the samples were centrifuged (2500 rpm for 10 minutes at approximately 4° C.) and the resulting serum was recovered and stored frozen (≤−60° C.) in appropriately labeled tubes. The serum samples were analyzed at ITR using an Alkaline Phosphatase (ALP) Enzymatic Assay qualified under ITR Study No. 52086.

[0743] There were no pharmacokinetic time point deviations noted in this study. The location of blood withdrawal was noted in the raw data.

[0744] The stability of the test item in the biological matrix at concentrations suitable for the calibration range should be confirmed in the Bioanalytical Report. This should include the duration from sample collection until completion of sample analysis and at the storage conditions used on the study.

[0745] Non-Compartmental Analysis

[0746] The pharmacokinetic parameters were calculated at ITR.

[0747] Non-compartmental analysis of ALP concentrations in serum data set obtained on Day 1 was performed by using the Phoenix® WinNonlin® software.

[0748] The following configuration was used for the analysis by default.

[0749] Sampling Method: Sparse

[0750] AUC Calculation Method: Linear Trapezoidal with Linear Interpolation.

[0751] Lambda Z (λz) Method: Best fit for λz, Log regression

[0752] Weighting (λz calculation): Uniform

[0753] Pharmacokinetic parameters (including abbreviation and description for each parameter) are described in the following table:

| Parameters | Abbreviation |
|---|---|
| Area under the serum drug concentration-time curve | AUC_{0-Tlast} |
| from the time of dosing to the last quantifiable | |
| concentration | |
| Area under the serum drug concentration-time curve | AUC_{INF} |
| from the time of dosing extrapolated to infinity | |
| Terminal elimination half-life | t_{1/2} |
| The maximum serum concentration | Cₘₐₓ |
| Time to maximum serum concentration | Tₘₐₓ |
| Total body clearance per kg body weight | Cl |
| Volume of distribution per kg body weight | V_{z} |

[0754] Results

[0755] Dose Formulation Analysis

[0756] No ALP was detected in any of the samples collected from the control (Group 1) formulations.

[0757] No dose formulation sample was collected from Group 4-RMP-003 due to insufficient volume.

[0758] The analysis of the dose formulation samples collected from Group 2-RMP-001 (2 mg/mL) determined that the ALP concentration was 93.7% of the nominal concentration and were therefore considered to be acceptable for use on the study (within the accepted criteria of 90 to 110% of the nominal concentration).

[0759] The analysis of the dose formulation samples collected from Groups 3 to 7—RMP-002 RMP-004, RMP-005, RMP-006, RMP-007, and RMP-008—(all at 2 mg/mL), determined that the ALP concentrations ranged from 44.3 to 59.8% of the nominal concentrations and were unexpectedly below the accepted criteria of 90 to 110% of the nominal concentration).

[0760] Review of related raw data showed that these unexpected results and serum ALP concentrations are due to discrepancies between the initial estimation of the concentration of RMP-002 to RMP-008 at the UCLA core lab and the concentration of the test articles measured by UV absorbance reading at ITR. Animals have thus been administered with various doses of the test items as summarized in Table 6 below. Actual dose for RMP-003 could not be established as there was not enough material left for UV absorbance measurement.

TABLE 6
Estimation of the actual dose received by each
group of mice at the initiation of the study.

| | Nominal Dose | Coeff | Actual dose |
|---|---|---|---|
| Analyte | mg/kg | correct. | (mg/kg) |
| RMP-001 | 5 | 0.937 | 4.69 |
| RMP-002 | 5 | 0.509 | 2.54 |
| RMP-003 | 5 | | |
| RMP-004 | 5 | 0.519 | 2.59 |
| RMP-005 | 5 | 0.598 | 2.99 |
| RMP-006 | 5 | 0.534 | 2.67 |
| RMP-007 | 5 | 0.568 | 2.84 |
| RMP-008 | 5 | 0.443 | 2.22 |

[0761] Mortality

[0762] There was no mortality during the course this study.

[0763] Clinical Signs

[0764] There were no clinical signs that could be attributed to the intravenous administration of the 8 forms of the test items at a nominal dose level of 5 mg/kg.

[0765] Body Weight

[0766] Body weights were recorded during the pre-treatment period for general health status evaluation and on Day −1 for the purpose of dose volumes calculation. Body weights recorded during the pre-treatment period were within the normal biological range and suggested that the animals were suitable for use throughout the study.

[0767] PK Curves

[0768] The curves related to variation of the concentrations of all the 8 test items over the 72-h period post dosing are shown in FIG. 14.

[0769] The values for each time-point and each test item represent the actual concentrations corrected for the specific activity of each test item. They were computed as follow. Raw data (expressed as Vmax) generated by the determination of the activity in each blood samples were first transformed in concentrations (μg/mL) using the calibration curve (Vmax vs concentration) obtained for the reference standard RMP-001* for which the specific activity is known (315.3 IU/mg). Then each concentration value was corrected for specific activity using the ratio RMP-001*/RMP-00X for each test item (see Table 4). Results show that most of the PK curves (RMP-004 to RMP-008) are very close to each other and located significantly below the curve for RMP-001. This was expected as RMP-001 is an Fc-fusion construct, which are characterized by a higher systemic exposure due to a lower clearance rate. Of note, RMP-002 and RMP-003 are clearly outliers in the series of data. RMP-002 is a compound that was shared by two different laboratories and probably submitted to suboptimal storage and shipping conditions, which might explain its low specific activity. Quantities of RMP-003 were low and insufficient for allowing the determination of its true concentration by measuring the UV A280. Thus no correction was done for this compound. If the concentration of RMP-003 was also overestimated by a factor of 2, as it was for all the other test items, the PK curve retatedhttps://www.nytimes.com/2020/08/20/health/covid-oleandrin-trump-mypillow.html to RMP-003 would also be similar to the main group of compounds without an Fc domain.

[0770] As seen in FIG. 15, all the PK curves related to (DSS)6-tagged compounds (RMP-005, RMP-006 and RMP-008) are very similar. Moreover the introduction of a (GGGGS)2 linker to RMP-005 (as done in RMP-006) has little impact on the PK profile.

[0771] The same conclusion can be made for RMP-004 and RMP-007, which both carry a D10 tag (see FIG. 16).

[0772] Cmax/Tmax

[0773] Cmax values can also be extracted easily from the above PK data and Tmax coincides with the earliest blood sample time (5 min post dosing). There is considerable variations in those values between the same group as withdrawal has to be made 5 min only after dosing when injected compounds are rapidly removed from the central compartment (blood) through their distribution into other body compartments. For a systemically injected drug, those values are not very meaningful. Nonetheless they are shown in FIG. 17.

[0774] Area Under the Curve (Extrapolated to Infinity)

[0775] The area under the plasma drug concentration-time curve (AUC) reflects the actual body exposure to drug after administration of a dose of the drug and is expressed in mg*h/L. This area under the curve is dependent on the rate of elimination of the drug from the body and the dose administered. The total amount of drug eliminated by the body is assessed by adding up or integrating the amounts eliminated in each time interval, from time zero (time of the administration of the drug) to infinite time. This total amount corresponds to the fraction of the dose administered that reaches the systemic circulation. The AUC is inversely proportional to the clearance of the drug.

[0776] The original AUCinf values computed by ITR were corrected to take into account the specific activity of each test items and are presented in FIG. 18 (blue bars). Moreover another corrective step was introduced to normalize all AUC data for a 5 mg/Kg dosage (green bars). This correction was needed as the AUC is generally proportional to the dose. It should minimize any discrepancies due to the original erroneous estimation of the doses administered to each group. There is a single value for each test item AUC.

[0777] No SEs or confidence intervals could be calculated because a sparse sampling method was used for data collection.

[0778] Data related to groups that had received RMP-002 and RMP-003 have to be interpreted with cautions as these compounds behaved as outliers in the overall PK study for the reasons explained before. Interestingly, test items RMP-004 to RMP-008 have all AUC values that are roughly 20% to 40% that of RMP-001.

[0779] Test Item Clearance

[0780] After Tmax, test item serum concentrations declined at an estimated t½ ranging from 6.11 hours (RMP-004) to 34.6 hours (RMP-001), see data in FIG. 19. Most of the test items (RMP-002 to RMP-008) are in the 15 to 20 hour range. The reason why RMP-004 has such a low half-life value is not clear.

[0781] The test item was cleared (Cl) at a mean rate of 3.37 mL/hr/kg (RMP-001) up to 23.6 mL/hr/kg (RMP-002). The mean volume of distribution (Vz) ranged from 168 mL/kg (RMP-001) to 515 mL/kg (RMP-002), suggesting that all test items were minimally distributed among tissues. There was no correction needed for all the above clearance parameters as their assessment does not rely on concentration values.

### CONCLUSION

[0782] The aim of the study was to compare the PK parameters of various forms of bone-targeted TNSALP to those of Asfotase alfa (RMP-001). There is a good convergence of PK data showing that non-Fc versions of the test items are cleared from the bloodstream faster than Asfotase alfa, as expected. However half-lives and systemic exposure remain in a range compatible with an efficacious bone-targeted drug delivery strategy. In this strategy smaller molecules should have an increased access to the mineralized portion of the bone compared to larger Fc-fusions as they are expected to extravasate more easily from the capillary network into the mineralized surface of bone. This however remains to be verified experimentally in biodistribution studies.

### Example 5—Lead Candidate Selection

[0783] The selection of the lead candidate “FG12w.MND.kz.IgKVIII.TNALPco(mut-miR362a).Fc.(DSS)6.WPRE” (SEQ ID NO:74) is described herein.

[0784] Screening of Secretion Signal Peptides

[0785] Initially, various vectors were screened based on secreted TNALP activity. The vectors screen included: EF1a-RMP5, EF1a-IgG2H-RMP5 (SEQ ID NO: 55), EF1a-SEAP-RMP5 (SEQ ID NO: 65), EF1a-aLA-RMP5 (SEQ ID NO: 64), EF1a-hCD33-RMP5 (SEQ ID NO: 58), EF1a-Secrecon-RMP5 (SEQ ID NO: 60), EF1a-Secrecon-AA-RMP5 (SEQ ID NO: 61), EF1a-mIgKVIII-AA-RMP5 (SEQ ID NO: 62), and EF1a-hIgKVIII-AA-RMP5 (SEQ ID NO: 57).

[0786] 1e5 293T cells per well were transfected with constructs (SEQ ID NOS: 19, 55, 65, 64 and 66) using calcium phosphate method at d0. ALP activity was measured at d2. Results showed IgG2H (MGWSCIILFLVATATGVHS) (SEQ ID NO: 33) stood out by mediating >2X secreted ALP activity compared to endogenous TNALP signal peptide in 293 transfection. In a second-round screening, 1e5 293T cells per well were transfected with constructs (SEQ ID NOS: 19, 55, 65, 60, 61, 62 and 57) using calcium phosphate method at d0. ALP activity was measured at day 2. hIgKVIII (MDMRVPAQLLGLLLLWLRGARCAA) (SWEQ ID NO: 35) was chosen as lead secretion signal candidate due to an about 46% increase of ALP secretion over IgG2H and its comparatively low immunogenicity risk compared with mIgKVIII. Results demonstrated engineering signal peptide could greatly improve the secretion of TNALP of the disclosed lentivector constructs. The results are set forth in FIGS. 21A and 21B.

[0787] Subsequently, EF1a-promoter-driven TNALP DNA constructs having SEQ ID NO: 19 and EF1a promoter-driven TNALP DNA construct with IgG2H secretion signal peptide having SEQ ID No: 55 were used to generate VSVG-pseudotyped lentivectors by co-transfecting 293T human embryonic kidney cells with other 3 plasmids. Lentivirus supernatants were harvested to transduce 293 and Jurkat cells at dilution factors 4, 16 and 64, respectively. The supernatant was harvested for ALP activity assay and cell pellets were harvested for VCN analysis on ddPCR at day 14. Results showed the IgG2H signal peptide mediated a modest 2-fold increase in ALP secretion from 59.9 U/L to 136.4 U/L in 293T cells (FIG. 22A), but a significantly increased secretion over 10-fold in Jurkat cells from 0.069 U/L to 0.782 U/L (FIG. 22B).

[0788] These results demonstrated that replacement of wildtype TNALP signal peptide with engineering signal peptides IgG2H could increase the secretion of TNALP in not just human embryonic kidney cell but also in a hematopoietic T cell line which is a representative of an HSC-derived lineage.

[0789] Removal of Susceptible Myeloid-Lineage miRNA Binding Sites

[0790] Next, susceptible myeloid-lineage miRNA binding sites from RMP5 were removed. The sequence of RMP5 (described herein) between 762-792 bp was believed to be susceptible to being targeted by miRNA362-5p, while Yang et al indicated MiR-362-5p is highly expressed in hemopoietic lymphoid and myeloid lineages (Yang, P., Ni, F., Deng, Rq. et al. MiR-362-5p promotes the malignancy of chronic myelocytic leukemia via down-regulation of GADD45α. Mol Cancer 14, 190 (2015)). To eliminate potential miR-362-5p silencing in hemopoietic lymphoid and myeloid lineages, two mutations were created (miRNA362-A and miRNA362-B) through switching codon usage in RMP5 between 769 and 792 bps. Calcium phosphate was used to transfect 293T cells with 3 plasmids (SEQ ID NOS: 19, 81 and 82, respectively). Supernatant was harvested for ALP activity assay at day 3 after transfection (see FIG. 23A). Mutant A shows comparable TNALP secretion as parental construct in 293 cell transfection while miR362-B was discarded due to dramatically reduced TNALP secretion (FIG. 23B). The construct (SEQ ID NO:81) was further used to generate lentivector.

[0791] Lentivirus supernatants were harvested to transduce Jurkat and K562 cells at dilution factors 4, 16 and 64, respectively. Supernatant was harvested for ALP activity assay and cell pellets were harvested for VCN analysis on ddPCR at day 14. The construct (SEQ ID NO:81) outperformed the original construct (SEQ ID NO:19) in two myeloid cell lines with high expression of miR-362-5p by more than about 60%. These results reflect efforts to improve the potency of the disclosed constructs through the removal of one or more susceptible myeloid-lineage-miRNA binding sites.

[0792] Addition of Translation Initiation Sequences to Promote Efficient Translation of RMP5 mRNA

[0793] Next, 1e5 293T cells per well were transfected with the constructs (SEQ ID NO:84 and 85) using calcium phosphate method at d0 and ALP activity is measured at d2. Results showed addition of Kozak sequence increased TNALP secretion by about 36%. This suggested that the addition of translation initiation sequences could promote efficient translation of RMP5 mRNA

[0794] Lead Candidate Selection and Qualification

[0795] Lead candidates were then selected based on the optimized vector designs. Six TNALP LVV constructs with different promoters MND/EF1a and signal peptides wildtype, Gigha and IgKVIII (SEQ ID No: 19, 55, 57, 79, 86 and 87) were used to generate VSVG-pseudotyped lentivectors by co-transfecting 293T human embryonic kidney cells with other 3 plasmids. Lentivirus supernatants were harvested to transduce 293, K562 and Jurkat cells at dilution factors 4, 16 and 64, respectively. Supernatant was then harvested for ALP activity assay and cell pellets were harvested for VCN analysis on ddPCR at day 14. Those lentivectors had similar titer between 5e+6 and 1e+7 IU/mL (FIG. 25A). Data (FIGS. 25B-25D) indicates that IgG2H was better than TNALP wildtype secretion signal in transduced Jurkat and K562; and that MND promoter with 400-bps insulator outperformed the EF1a promoter in both hematopoietic cell lines. The addition of an Fc fusion partner was believed to have minimal impact on TNALP secretion in three cell lines. It was also found that the miR362-A mutation performed better than the original construct in both myeloid cell lines; and that the TNALP secretion from IgKVIII was superior to IgG2H in all three cell lines. From this experiment, a combinatory construct of MND promoter, IgKVIII, miR362-mutation, and Fc was suggested to be the lead construct.

[0796] Six TNALP LVV constructs with two different promoters (MND or EF1a), two different signal peptides (IgGH or IgKVIII), non-Fc-fused or Fc-fused RMP5 constructs (SEQ ID No: 55, 84, 85, 87, 88 and 89) were used to generate VSVG-pseudotyped lentivectors by co-transfecting 293T human embryonic kidney cells with other 3 plasmids. Lentivirus supernatants were harvested to transduce 293 cells at dilution factors of 4, 16 and 64, respectively. Supernatant was then harvested for ALP activity assay and cell pellets were harvested for VCN analysis on ddPCR at day 14. Those lentivectors had similar titer between 5e+6 and 1e+7 IU/mL (FIG. 26A). FIG. 26B indicated that the potency (ALP per VCN) of Fc-fused construct—EF1-IgG2H-RMP5-Fc (SEQ ID: 87) is only about 20% lower than that of non-Fc-fused construct—EF1a-IgG2H-RMP5 (SEQ ID: 55). Considering that no toxicity was observed in the mouse model for the Fc-fused version and further considering that the circulation time of the Fc-fused version is more than double of that of non-Fc-fused version (6.1 vs 15-20 hrs.), it was believed worthy to include Fc into the lead candidate. Data suggested that the potency of the codon-optimized non-Fc-fused/Fc-fused constructs (SEQ ID NOS: 55 and 87)) was similar, if not better than that of cDNA non-Fc-fused/Fc-fused constructs (SEQ ID NOS: 88 and 89). Based on data, it was believed that the addition of Kozak increased the potency about 2-fold. Overall, the ultimate combinatory construct of 400 bps insulator, MND promoter, Kozak element, IgKVIII, miR362-mutation and Fc (1400-MND-kozak-IgKVIII-RMP5(miR-A)-Fc-DSS6 (SEQ ID: 85) demonstrated about 30 fold higher potency as compared with the candidate construct EF1-IgG2H-RMP5-Fc (SEQ ID: 87) in 293T cells. This suggested that it is necessary to combine multiple engineering approaches to lead to achieve superior potency.

[0797] Two TNALP LVV constructs (I400-MND-kozak-IgKVIII-RMP5(miR-A)-Fc-DSS6 SEQ ID: 85 and EF1a-IgG2H-RMP5-Fc SEQ ID: 87) used to generate VSVG-pseudotyped lentivectors by co-transfecting 293T human embryonic kidney cells with other 3 plasmids. Lentivirus supernatants were harvested and concentrated through TFF. Human adult mobilized peripheral blood CD34+ hematopoietic stem cells were thawed and pre-stimulated with SCF, 113, TPO and Flt3 overnight. Transduction was then carried out by adding vectors into the cells in the presence of the transduction enhancers dmPGE2 and F108. The media of the transduced cells was refreshed to SFEMII supplemented with IL3 and G-CSF for 7 days and changed to G-CSF-contained SFEM II from day 8 to day 14. The supernatant was subsequently taken out for ALP analysis at day 4, 8 and 14. VCN analysis was carried out on cell pellets on day 14. Results show that the potency of 400inMND-RMP100 is 4.9 fold greater day 4, 8.5 fold greater at day 8 and more than 10 fold greater at day 14 as compared with I400-MND-IgG2H-RMP5-Fc (see FIG. 27). The results confirmed the finding in 293T and the combinatory construct of 400 bps insulator, MND promoter, Kozak element, IgKVIII, miR362-mutation and Fc (I400-MND-kozak-IgKVIII-RMP5(miR-A)-Fc-DSS6 SEQ ID: 85) had significantly increased ALP secretion not just in 293t but more importantly in our target cells—adult mobilized peripheral blood CD34+ hematopoietic stem cells.

[0798] Five TNALP LVV constructs with two different promoters (MND or EF1a), two different signal peptides (IgGH or IgKVIII) (SEQ ID NOS: 55, 88, 85, 74 and 89) were used to generate VSVG-pseudotyped lentivectors by co-transfecting 293T human embryonic kidney cells with other 3 plasmids. Virus supernatants were used to transduce Jurkat, HL-60 and THP-1 cells at dilution factors of about 4, about 16, and about 64. Supernatant was harvested for ALP activity assay and cell pellets were harvested for VCN analysis on ddPCR at day 14. Results (FIGS. 28 and 29) illustrated that the MND promoter provided for increased expression of TNFAMP activity (per VCN) as compared with the EF1a promoter in Jurkat and HL-60 cells.

[0799] Four TNALP LVV constructs (SEQ ID NOS: 55, 85, 74 and 90) were used to generate VSVG-pseudotyped lentivectors by co-transfecting 293T human embryonic kidney cells with three other plasmids. Lentivirus supernatants were harvested and concentrated through TFF [0301]. Virus supernatants were used to transduce 293T cells at MOI=0.1, 0.2, 0.5, 1, 2, 5 & 10 and human adult CD34+ hematopoietic stem cells at MOI=20. Human adult mobilized peripheral blood CD34+ hematopoietic stem cells were thawed and pre-stimulated with SGSM serum-free media supplemented with SCF, 113, TPO, Flt3, UM171&SR1 overnight. Then transduction was carried out at different MOIs by adding vectors into the cells in the presence of transduction enhancers dmPGE2 and F108. The media of transduced cells were refreshed to SFEMII supplemented with SCF, 113, TPO, Flt3, UM171&SR1 for 14 days. The supernatant was removed for ALP analysis at day 8 and VCN analysis was carried out on cell pellets on day 14. Results shows potency of 400inMND-RMP100 was about 2-fold of MND-RMP100 and about 8 fold of EF1a-RMP100 in HSC, respectively (see FIGS. 30A-30C).

[0800] Three TNALP LVV constructs (SEQ ID NOS: 85, 74 and 90) were used to generate VSVG-pseudotyped lentivectors by co-transfecting 293T human embryonic kidney cells with three other plasmids. Lentivirus supernatants were harvested and concentrated through TFF. Human adult mobilized peripheral blood CD34+ hematopoietic stem cells were thawed and pre-stimulated with SCF, 113, TPO and Flt3 overnight. Then transduction was carried out at different MOIs by adding vectors into the cells in the presence of transduction enhancers dmPGE2 and F108. The transduced HSC was seeded in Methocult cellulose for 14 days before readout of colonies. CFU data suggested transduced HSC transduced with MND-400 in-RMP100, EF1a-RMP100 and MND-RMP100 at MOIs from 5 to 20 had similar colony-forming capability compared with mock HSC. No oblivious toxicity were observed for all constructs in HSC (see FIGS. 31A and 31B).

[0801] Three TNALP LVV constructs (SEQ ID NOS: 85, 74 and 90) were used to generate VSVG-pseudotyped lentivectors by co-transfecting 293T human embryonic kidney cells with three other plasmids. Lentivirus supernatants were harvested and used to transduce THP-1, Jurkat & HLP-60 at dilution factor 4, 16 and 64. After transduction, the transduced cells were cultured for up-to 56 days and cell pellets were collected for VCN analysis at day 14, 28, 42 and 56, respectively. All constructs showed robust stability in transduced cell lines THP-1, HL_60 & Jurkat (see FIGS. 32A-32D).

[0802] All of the U.S. patents, U.S. patent application publications, U.S. patent applications, foreign patents, foreign patent applications and non-patent publications referred to in this specification and/or listed in the Application Data Sheet are incorporated herein by reference, in their entirety. Aspects of the embodiments can be modified, if necessary, to employ concepts of the various patents, applications, and publications to provide yet further embodiments.

[0803] Disclosed herein are additional embodiments of the present disclosure, including alternatives of certain additional embodiments. Where an additional embodiment depends from a referenced additional embodiment that includes one or more alternatives, that dependent additional embodiment hereby refers back to the referenced additional embodiment and any of its described alternatives.

[0804] Although the present disclosure has been described with reference to a number of illustrative embodiments, it should be understood that numerous other modifications and embodiments can be devised by those skilled in the art that will fall within the spirit and scope of the principles of this disclosure. More particularly, reasonable variations and modifications are possible in the component parts and/or arrangements of the subject combination arrangement within the scope of the foregoing disclosure, the drawings, and the appended claims without departing from the spirit of the disclosure. In addition to variations and modifications in the component parts and/or arrangements, alternative uses will also be apparent to those skilled in the art.
[0805] Additional Embodiment 1. A Polypeptide Comprising Formula (I):

[A]ᵥ-[B]-[C]_{w}-[R]_{q}-([D]ₓ[E]_{y})_{z}, (I)
[0806] wherein
   [0807] A comprises an amino acid sequence encoding a secretion signal peptide;
   [0808] B comprises an amino acid sequence having at least 90% sequence identity to SEQ ID NO: 11 (e.g., at least about 95% sequence identity to SEQ ID NO: 11, at least about 96% sequence identity to SEQ ID NO: 11, at least about 97% sequence identity to SEQ ID NO: 11, at least about 98% sequence identity to SEQ ID NO: 11, at least about 99% sequence identity to SEQ ID NO: 11, or 100% sequence identity to SEQ ID NO: 11);
   [0809] C comprises an amino acid sequence encoding a GPI anchor;
   [0810] R is -(Mₒ(Fc)Nₚ)-, where M and N each independently include between 1 and 6 amino acids, where Fc is a Fc domain, and o and p are each independently 0, 1, or 2;
   [0811] D comprises an amino acid sequence having between 4 and 6 amino acids, or is F(G)ₜF, where each F is the same amino acid, G is an amino acid sequence having 3, 4, or 5 amino acids, and t is an integer ranging from 2-5;
   [0812] E comprises an amino acid sequence having between 1 and 8 amino acids;
   [0813] q is 0 or 1;
   [0814] v is 0 or 1;
   [0815] w is 0 or 1;
   [0816] x is 0 or an integer ranging from 1 to 6;
   [0817] y is 0 or an integer ranging from 1 to 16; and
   [0818] z is 0 or an integer ranging from 1 to 6.
[0819] Additional Embodiment 2. The polypeptide of additional embodiment 1, wherein [A]ᵥ-[B]-[C]_{w} comprises an amino acid sequence having at least 90% sequence identity to SEQ ID NO: 10.
[0820] Additional Embodiment 3. The polypeptide of additional embodiment 1, wherein [A]ᵥ-[B]-[C]_{w} comprises an amino acid sequence having SEQ ID NO: 10.
[0821] Additional Embodiment 4. The polypeptide of additional embodiment 1, wherein A comprises an amino acid sequence having at least 95% identity to any one of SEQ ID NOS: 12 and 33-43.
[0822] Additional Embodiment 5. The polypeptide of additional embodiment 1, wherein A comprises an amino acid sequence having any one of SEQ ID NOS: 12 and 33-43.
[0823] Additional Embodiment 6. The polypeptide of any additional embodiment 1, wherein v is 1 and w is 0. Alternatively, the polypeptide of any additional embodiment 1, wherein v is 1, w is 0, and q is 0. Alternatively, the polypeptide of any additional embodiment 1, wherein v is 1, w is 0, q is 0, and z is 1. Alternatively, the polypeptide of any additional embodiment 1, wherein v is 1, w is 0, and q is 1. Alternatively, the polypeptide of any additional embodiment 1, wherein v is 1, w is 0, q is 1, and z is 1.
[0824] Additional Embodiment 7. The polypeptide of any one of additional embodiments 1 and 4 to 5, wherein z is 0.
[0825] Additional Embodiment 8. The polypeptide of any one of additional embodiments 1 and 4 to 6, wherein x is 0.
[0826] Additional Embodiment 9. The polypeptide of additional embodiment 1, wherein the polypeptide has at least 95% sequence identity to SEQ ID NO: 2.
[0827] Additional Embodiment 10. The polypeptide of additional embodiment 1, wherein the polypeptide comprises SEQ ID NO: 2.
[0828] Additional Embodiment 11. The polypeptide of any one of additional embodiments 1, 4, and 5 wherein E comprises at most two amino acids.
[0829] Additional Embodiment 12. The polypeptide of any one of additional embodiments 1, 4, and 5, wherein E comprises 1 amino acid.
[0830] Additional Embodiment 13. The polypeptide of any one of additional embodiments 11 and 12, where E comprises aspartic acid.
[0831] Additional Embodiment 14. The polypeptide of any one of additional embodiments 11 to 13, wherein y ranges from between 8 and 12. Alternatively, the polypeptide of any one of additional embodiments 11 to 13, wherein y ranges from between 8 and 12, and q is 0. Alternatively, the polypeptide of any one of additional embodiments 11 to 13, wherein y ranges from between 8 and 12, q is 0, and z is 1. Alternatively, the polypeptide of any one of additional embodiments 11 to 13, wherein y ranges from between 8 and 12, and q is 1. Alternatively, the polypeptide of any one of additional embodiments 11 to 13, wherein y ranges from between 8 and 12, q is 1, and z is 1.
[0832] Additional Embodiment 15. The polypeptide of any one of additional embodiments 11 to 14, wherein v is 1 and w is 0. Alternatively, the polypeptide of any one of additional embodiments 11 to 14, wherein v is 1, w is 0, and q is 0. Alternatively, the polypeptide of any one of additional embodiments 11 to 14, wherein v is 1, w is 0, q is 0, and z is 1. Alternatively, the polypeptide of any one of additional embodiments 11 to 14, wherein v is 1 and w is 0, and q is 1. Alternatively, the polypeptide of any one of additional embodiments 11 to 14, wherein v is 1 and w is 0, q is 1, and z is 1.
[0833] Additional Embodiment 16. The polypeptide of any one of additional embodiments 11 to 15, wherein x is 0.
[0834] Additional Embodiment 17. The polypeptide of any one of additional embodiments 11 to 16, where y is 10. Alternatively, the polypeptide of any one of additional embodiments 11 to 16, where y is 10 and q is 0. Alternatively, the polypeptide of any one of additional embodiments 11 to 16, where y is 10, q is 0, and z is 1. Alternatively, the polypeptide of any one of additional embodiments 11 to 16, where y is 10 and q is 1. Alternatively, the polypeptide of any one of additional embodiments 11 to 16, where y is 10, q is 1, and z is 1.
[0835] Additional Embodiment 18. The polypeptide of additional embodiment 1, wherein the polypeptide has at least 95% sequence identity to SEQ ID NO: 3.
[0836] Additional Embodiment 19. The polypeptide of additional embodiment 1, wherein the polypeptide comprises SEQ ID NO: 3.
[0837] Additional Embodiment 20. The polypeptide of any one of additional embodiments 1, 4, and 5, wherein D comprises at most 5 amino acids.
[0838] Additional Embodiment 21. The polypeptide of additional embodiment 20, wherein at least three contiguous amino acids of the at most 5 amino acids are the same. Alternatively, the polypeptide of additional embodiment 20, wherein at least four contiguous amino acids of the at most 5 amino acids are the same.
[0839] Additional Embodiment 22. The polypeptide of additional embodiment 21, wherein the at least three contiguous amino acids are each glycine. Alternatively, the polypeptide of additional embodiment 21, wherein the at least three contiguous amino acids are each glycine and where q is 0. Alternatively, the polypeptide of additional embodiment 21, wherein the at least three contiguous amino acids are each glycine and where q is 1.
[0840] Additional Embodiment 23. The polypeptide of any one of additional embodiments 20 to 22, wherein x is an integer ranging from 1 to 3.
[0841] Additional Embodiment 24. The polypeptide of any one of additional embodiments 20 to 22, wherein x is 2.
[0842] Additional Embodiment 25. The polypeptide of any one of additional embodiments 20-24, wherein y is an integer ranging from between 4 and 8.
[0843] Additional Embodiment 26. The polypeptide of additional embodiment 25, wherein y is between 5 and 7.
[0844] Additional Embodiment 27. The polypeptide of any one of additional embodiments 25-26, wherein y is 6.
[0845] Additional Embodiment 28. The polypeptide of any one of additional embodiments 20-27, wherein E comprises 3 amino acids.
[0846] Additional Embodiment 29. The polypeptide of additional embodiment 28, wherein at least 2 contiguous amino acids of the three amino acids are the same.
[0847] Additional Embodiment 30. The polypeptide of any one of additional embodiments 20-29, wherein E comprises -asp-ser-ser-.
[0848] Additional Embodiment 31. The polypeptide of additional embodiment 1, wherein the polypeptide has at least 95% sequence identity to SEQ ID NO: 6.
[0849] Additional Embodiment 32. The polypeptide of additional embodiment 1, wherein the polypeptide comprises SEQ ID NO: 6.
[0850] Additional Embodiment 33. The polypeptide of any one of additional embodiments 20-24, wherein y is between 8 and 12.
[0851] Additional Embodiment 34. The polypeptide of any one of additional embodiments 20-24, wherein y is 10.
[0852] Additional Embodiment 35. The polypeptide of any one of additional embodiments 20-24 and 33-34, wherein E comprises 1 or 2 amino acids.
[0853] Additional Embodiment 36. The polypeptide of any one of additional embodiments 20-24 and 33-35, wherein E comprises 1 amino acid.
[0854] Additional Embodiment 37. The polypeptide of any one of additional embodiments 20-24 and 33-36, where E comprises only aspartic acid amino acid.
[0855] Additional Embodiment 38. The polypeptide of additional embodiment 1, wherein the polypeptide has at least 95% sequence identity to SEQ ID NO: 4.
[0856] Additional Embodiment 39. The polypeptide of additional embodiment 1, wherein the polypeptide comprises SEQ ID NO: 4.
[0857] Additional Embodiment 40. The polypeptide of any one of additional embodiments 1, 4, and 5, where E comprises between 2 and 4 amino acids. Alternatively, the polypeptide of any one of additional embodiments 1, 4, and 5, where E comprises between 2 and 4 amino acids and where q is 0. Alternatively, the polypeptide of any one of additional embodiments 1, 4, and 5, where E comprises between 2 and 4 amino acids, q is 0, and z is 1. Alternatively, the polypeptide of any one of additional embodiments 1, 4, and 5, where E comprises between 2 and 4 amino acids and where q is 1. Alternatively, the polypeptide of any one of additional embodiments 1, 4, and 5, where E comprises between 2 and 4 amino acids, q is 1, and z is 1.
[0858] Additional Embodiment 41. The polypeptide of additional embodiment 40, wherein E comprises 3 amino acids.
[0859] Additional Embodiment 42. The polypeptide of any one of additional embodiments 40-41, wherein at least 2 contiguous amino acids of the 3 amino acids are the same.
[0860] Additional Embodiment 43. The polypeptide of any one of additional embodiments 40-42, wherein y ranges from 3 to 8, preferably wherein y ranges from 4 to 8.
[0861] Additional Embodiment 44. The polypeptide of any one of additional embodiments 40-42, wherein y ranges from 5 to 7.
[0862] Additional Embodiment 45. The polypeptide of any one of additional embodiments 40-42, wherein y is 6.
[0863] Additional Embodiment 46. The polypeptide of any one of additional embodiments 40-45, wherein E comprises -asp-ser-ser-.
[0864] Additional Embodiment 47. The polypeptide of any one of additional embodiments 40-46, wherein v is 1 and w is 0.
[0865] Additional Embodiment 48. The polypeptide of additional embodiment 1, wherein the polypeptide has at least 95% sequence identity to any one of SEQ ID NOS: 5 and 44-54.
[0866] Additional Embodiment 49. The polypeptide of additional embodiment 1, wherein the polypeptide comprises any one of SEQ ID NOS: 5 and 44-54.
[0867] Additional Embodiment 50. The polypeptide of any one of additional embodiments 40-47, wherein the amino acid sequence encoding the GPI anchor has at least 95% sequence identity to SEQ ID NO: 13 (e.g., at least 96% sequence identity to SEQ ID NO: 13, at least 97% sequence identity to SEQ ID NO: 13, at least 98% sequence identity to SEQ ID NO: 13, at least 99% sequence identity to SEQ ID NO: 13, or where the GPI anchor comprises SEQ ID NO: 13).
[0868] Additional Embodiment 51. The polypeptide of any one of additional embodiments 40-47, wherein the amino acid sequence encoding the GPI anchor has SEQ ID NO: 14 (e.g., at least 96% sequence identity to SEQ ID NO: 14, at least 97% sequence identity to SEQ ID NO: 14, at least 98% sequence identity to SEQ ID NO: 14, at least 99% sequence identity to SEQ ID NO: 14, or where the GPI anchor comprises SEQ ID NO: 14).
[0869] Additional Embodiment 52. The polypeptide of additional embodiment 1, wherein the polypeptide has at least 95% sequence identity to SEQ ID NO: 8.
[0870] Additional Embodiment 53. The polypeptide of additional embodiment 1, wherein the polypeptide comprises SEQ ID NO: 8.
[0871] Additional Embodiment 54. The polypeptide of any one of additional embodiments 11-17, wherein v is 1 and w is 1.
[0872] Additional Embodiment 55. The polypeptide of additional embodiment 54, wherein the amino acid sequence encoding the GPI anchor has at least 95% sequence identity to SEQ ID NO: 13 (e.g., at least 96% sequence identity to SEQ ID NO: 13, at least 97% sequence identity to SEQ ID NO: 13, at least 98% sequence identity to SEQ ID NO: 13, at least 99% sequence identity to SEQ ID NO: 13, or where the GPI anchor comprises SEQ ID NO: 13).
[0873] Additional Embodiment 56. The polypeptide of additional embodiment 54, the amino acid sequence encoding the GPI anchor has SEQ ID NO: 14 (e.g., at least 96% sequence identity to SEQ ID NO: 14, at least 97% sequence identity to SEQ ID NO: 14, at least 98% sequence identity to SEQ ID NO: 14, at least 99% sequence identity to SEQ ID NO: 14, or where the GPI anchor comprises SEQ ID NO: 14).
[0874] Additional Embodiment 57. The polypeptide of additional embodiment 1, wherein the polypeptide has at least 95% sequence identity to SEQ ID NO: 7.
[0875] Additional Embodiment 58. The polypeptide of additional embodiment 1, wherein the polypeptide comprises SEQ ID NO: 7.
[0876] Additional Embodiment 59. A lentiviral vector including a nucleic acid sequence encoding the polypeptide of any one of additional embodiments 1 to 58.
[0877] Additional Embodiment 60. The lentiviral vector of additional embodiment 59, wherein the nucleic acid sequence encoding the polypeptide is operably linked to a promoter.
[0878] Additional Embodiment 61. The lentiviral vector of any one of additional embodiments 59 to 60, wherein the promoter is selected from the group consisting of EF1A, MND, CD11b, CD68LPp, EF1a 1, EFS, and UbC. In some embodiments, the promoter has at least 95% identity to any one of SEQ ID NOS: 66, 67, 96, 99, 100, 101, and 126. In some embodiments, the promoter has at least 96% identity to any one of SEQ ID NOS: 66, 67, 96, 99, 100, 101, and 126. In some embodiments, the promoter has at least 97% identity to any one of SEQ ID NOS: 66, 67, 96, 99, 100, 101, and 126. In some embodiments, the promoter has at least 95% identity to any one of SEQ ID NOS: 66, 67, 96, 99, 100, 101, and 126. In some embodiments, the promoter has at least 98% identity to any one of SEQ ID NOS: 66, 67, 96, 99, 100, 101, and 126. In some embodiments, the promoter has at least 99% identity to any one of SEQ ID NOS: 66, 67, 96, 99, 100, 101, and 126. In some embodiments, the promoter comprises any one of SEQ ID NOS: 66, 67, 96, 99, 100, 101, and 126.
[0879] Additional Embodiment 62. The lentiviral vector of any one of additional embodiments 59-61, further comprising a UCOE promoter element.
[0880] Additional Embodiment 63. The lentiviral vector of any one of additional embodiments 59-62, further comprising an insulator is selected from the group consisting of cHS 400 bp insulator, engineered mutant cHS 400 bp insulators—m3SD400 in & m6SD400 in.+−
[0881] Additional Embodiment 64. The lentiviral vector of any one of additional embodiments 59-63, further comprising one or more Scaffold/Matrix Attachment Regions.
[0882] Additional Embodiment 65. The lentiviral vector of any one of additional embodiments 59-64, further comprising a WPRE element. Alternatively, the lentiviral vector of any one of additional embodiments 59-64, further comprising a WPRE element and further including RRE, cPPT/CTS, and bGH-poly(A) signal.
[0883] Additional Embodiment 66. The lentiviral vector of any one of additional embodiments 59-64, wherein the lentiviral vector does not include a WPRE element. Alternatively, the lentiviral vector of any one of additional embodiments 59-64, wherein the lentiviral vector does not include a WPRE element, but does include RRE, cPPT/CTS, and bGH-poly(A) signal.
[0884] Additional Embodiment 67. The lentiviral vector of additional embodiment 59, wherein the lentiviral vector comprises a nucleotide sequence having at least 90% sequence identity to any one of SEQ ID NOS: 16-26, 55-65, 74, 81, 82, 84-95, 97, and 98.
[0885] Additional Embodiment 68. The lentiviral vector of additional embodiment 59, wherein the lentiviral vector comprises a nucleotide sequence having at least 95% sequence identity to any one of SEQ ID NOS: 16-26, 55-65, 74, 81, 82, 84-95, 97, and 98 (e.g., at least 96% sequence identity to any one of SEQ ID NOS: 16-26, 55-65, 74, 81, 82, 84-95, 97, and 98; 97% sequence identity to any one of SEQ ID NOS: 16-26, 55-65, 74, 81, 82, 84-95, 97).
[0886] Additional Embodiment 69. The lentiviral vector of additional embodiment 59, wherein the lentiviral vector comprises a nucleotide sequence having at least 98% sequence identity to any one of SEQ ID NOS: 16-26, 55-65, 74, 81, 82, 84-95, 97, and 98.
[0887] Additional Embodiment 70. The lentiviral vector of additional embodiment 59, wherein the lentiviral vector comprises a nucleotide sequence having at least 99% sequence identity to any one of SEQ ID NOS: 16-26, 55-65, 74, 81, 82, 84-95, 97, and 98.
[0888] Additional Embodiment 71. The lentiviral vector of additional embodiment 59, wherein the lentiviral viral vector comprises a nucleotide sequence having any one of SEQ ID NOS: 16-26, 55-65, 74, 81, 82, 84-95, 97, and 98.
[0889] Additional Embodiment 72. A lentiviral vector comprising a nucleotide sequence having at least 90% sequence identity to any one of SEQ ID NOS: 15-26, 55-65, 74, 81, 82, 84 95, 97, and 98.
[0890] Additional Embodiment 73. The lentiviral vector of additional embodiment 72, wherein the nucleotide sequence has at least 95% sequence identity to any one of SEQ ID NOS: 15 26, 55-65, 74, 81, 82, 84-95, 97, and 98.
[0891] Additional Embodiment 74. The lentiviral vector of additional embodiment 72, wherein the nucleotide sequence has at least 96% sequence identity to any one of SEQ ID NOS: 15 26, 55-65, 74, 81, 82, 84-95, 97, and 98.
[0892] Additional Embodiment 75. The lentiviral vector of additional embodiment 72, wherein the nucleotide sequence has at least 97% sequence identity to any one of SEQ ID NOS: 15 26, 55-65, 74, 81, 82, 84-95, 97, and 98.
[0893] Additional Embodiment 76. The lentiviral vector of additional embodiment 72, wherein the nucleotide sequence has at least 98% sequence identity to any one of SEQ ID NOS: 15 26, 55-65, 74, 81, 82, 84-95, 97, and 98.
[0894] Additional Embodiment 77. The lentiviral vector of additional embodiment 72, wherein the nucleotide sequence has at least 99% sequence identity to any one of SEQ ID NOS: 15 26, 55-65, 74, 81, 82, 84-95, 97, and 98.
[0895] Additional Embodiment 78. The lentiviral vector of additional embodiment 72, wherein the nucleotide sequence comprises any one of SEQ ID NOS: 15-26, 55-65, 74, 81, 82, 84-95, 97, and 98.
[0896] Additional Embodiment 79. A population of host cells transduced with any the lentiviral vector of any one of additional embodiments 59-78.
[0897] Additional Embodiment 80. A method of transducing a population of host cells comprising: obtaining a population of host cells and contacting the obtained population of host cells with the lentiviral vector of any one of additional embodiments 59-78.
[0898] Additional Embodiment 81. The method of additional embodiment 80, wherein the transduction occurs ex vivo.
[0899] Additional Embodiment 82. A pharmaceutical composition comprising the transduced host cells of additional embodiment 79 and a pharmaceutically acceptable excipient or carrier.
[0900] Additional Embodiment 83. A method of treating a mammalian subject comprising administering a therapeutically effective amount of the transduced host cells of additional embodiment 79 or the pharmaceutical composition of additional embodiment 82 to the mammalian subject.
[0901] Additional Embodiment 84. The polypeptide of any one of additional embodiments 1-83, wherein the polypeptide of Formula (I) does not have the amino acid sequence of SEQ ID NO: 1 or the amino acid sequence encoded by the nucleotide sequence of SEQ ID NO: 107; or provided that the polypeptide of Formula (I) is not Strensiq® or Asfotase alfa.
[0902] Additional Embodiment 85. The polypeptide of any one of additional embodiments 1-83, wherein when v is 1, w is 0, q is 1, o is 1, p is 1, N is the diamino acid -D-I-, M is the diamino acid -L-K-, [B] comprises SEQ ID NO: 11, Fc comprises, and x is 0, then [E]_{y} is not D₁₀-D₁₆.
[0903] Additional Embodiment 86. A polypeptide comprising Formula (I):

[A]ᵥ-[B]-[C]_{w}-[R]_{q}-([D]ₓ-[E]_{y})_{z}, (I)
[0904] wherein
   [0905] A comprises an amino acid sequence encoding a secretion signal peptide;
   [0906] B comprises an amino acid sequence having at least 90% sequence identity to SEQ ID NO: 11 (e.g., at least about 95% sequence identity to SEQ ID NO: 11, at least about 96% sequence identity to SEQ ID NO: 11, at least about 97% sequence identity to SEQ ID NO: 11, at least about 98% sequence identity to SEQ ID NO: 11, at least about 99% sequence identity to SEQ ID NO: 11, or 100% sequence identity to SEQ ID NO: 11);
   [0907] C comprises an amino acid sequence encoding a GPI anchor;
   [0908] R is -(Mₒ(Fc)Nₚ)-, where M and N each independently include between 1 and 6 amino acids, where Fc is a Fc domain, and o and p are each independently 0, 1, or 2;
   [0909] D comprises an amino acid sequence having between 4 and 6 amino acids, or is F(G)ₜF, where each F is the same amino acid, G is an amino acid sequence having 3, 4, or 5 amino acids, and t is an integer ranging from 2-5;
   [0910] E comprises an amino acid sequence having between 1 and 8 amino acids;
   [0911] q is 0 or 1;
   [0912] v is 0 or 1;
   [0913] w is 0 or 1;
   [0914] x is 0 or an integer ranging from 1 to 6;
   [0915] y is 0 or an integer ranging from 1 to 16; and
   [0916] z is 0 or an integer ranging from 1 to 6;
      provided that the polypeptide of Formula (I) is not conjugated to a sugar molecule, such as dextran.
[0917] Additional Embodiment 87. A polypeptide comprising Formula (I):

[A]ᵥ-[B]-[C]_{w}-[R]_{q}-([D]ₓ-[E]_{y})_{z}, (I)
[0918] wherein
[0919] A comprises an amino acid sequence encoding a secretion signal peptide;
[0920] B comprises an amino acid sequence having at least 90% sequence identity to SEQ ID NO: 11 (e.g., at least about 95% sequence identity to SEQ ID NO: 11, at least about 96% sequence identity to SEQ ID NO: 11, at least about 97% sequence identity to SEQ ID NO: 11, at least about 98% sequence identity to SEQ ID NO: 11, at least about 99% sequence identity to SEQ ID NO: 11, or 100% sequence identity to SEQ ID NO: 11);
[0921] C comprises an amino acid sequence encoding a GPI anchor;
[0922] R is -(Mₒ(Fc)Nₚ)-, where M and N each independently include between 1 and 6 amino acids, where Fc is a Fc domain, and o and p are each independently 0, 1, or 2;
[0923] D comprises an amino acid sequence having between 4 and 6 amino acids, or is F(G)ₜF, where each F is the same amino acid, G is an amino acid sequence having 3, 4, or 5 amino acids, and t is an integer ranging from 2-5;
[0924] E comprises an amino acid sequence having between 1 and 8 amino acids;
[0925] q is 0 or 1;
[0926] v is 0 or 1;
[0927] w is 0 or 1;
[0928] x is 0 or an integer ranging from 1 to 6;
[0929] y is 0 or an integer ranging from 1 to 16; and
[0930] z is 0 or an integer ranging from 1 to 6,
[0931] provided that the polypeptide having Formula (I) does not comprise SEQ ID NO: 1, or where the polypeptide having Formula (I) has less than 100% sequence identity to that of SEQ ID NO: 1, preferably less than 99% sequence identity to that of SEQ ID NO: 1, more preferably less than 98% sequence identity to that of SEQ ID NO: 1.
[0932] Additional Embodiment 88. A lentiviral vector including a nucleic acid sequence encoding the polypeptide of any one of additional embodiments 84-87.
[0933] Additional Embodiment 89. The lentiviral vector of additional embodiment 88, wherein the nucleic acid sequence encoding the polypeptide is operably linked to a promoter.
[0934] Additional Embodiment 90. The lentiviral vector of any one of additional embodiments 88 to 89, wherein the promoter is selected from the group consisting of EF1A, MND, CD11b, CD68LP, EF1a1, EFS, and UbC. In some embodiments, the promoter has at least 95% identity to any one of SEQ ID NOS: 66, 67, 96, 99, 100, 101, and 126. In some embodiments, the promoter has at least 96% identity to any one of SEQ ID NOS: 66, 67, 96, 99, 100, 101, and 126. In some embodiments, the promoter has at least 97% identity to any one of SEQ ID NOS: 66, 67, 96, 99, 100, 101, and 126. In some embodiments, the promoter has at least 95% identity to any one of SEQ ID NOS: 66, 67, 96, 99, 100, 101, and 126. In some embodiments, the promoter has at least 98% identity to any one of SEQ ID NOS: 66, 67, 96, 99, 100, 101, and 126. In some embodiments, the promoter has at least 99% identity to any one of SEQ ID NOS: 66, 67, 96, 99, 100, 101, and 126. In some embodiments, the promoter comprises any one of SEQ ID NOS: 66, 67, 96, 99, 100, 101, and 126.
[0935] Additional Embodiment 91. The lentiviral vector of any one of additional embodiments 88-90, further comprising a UCOE promoter element.
[0936] Additional Embodiment 92. The lentiviral vector of any one of additional embodiments 88-91, further comprising an insulator.
[0937] Additional Embodiment 93. The lentiviral vector of any one of additional embodiments 88-92, further comprising one or more Scaffold/Matrix Attachment Regions.
[0938] Additional Embodiment 94. The lentiviral vector of any one of additional embodiments 88-93, further comprising a WPRE element. Alternatively, the lentiviral vector of any one of additional embodiments 59-64, further comprising a WPRE element and further including RRE, cPPT/CTS, and bGH-poly(A) signal.
[0939] Additional Embodiment 95. The lentiviral vector of any one of additional embodiments 88-94, wherein the lentiviral vector does not include a WPRE element. Alternatively, the lentiviral vector of any one of additional embodiments 88-94, wherein the lentiviral vector does not include a WPRE element, but does include RRE, cPPT/CTS, and bGH-poly(A) signal.
[0940] Additional Embodiment 96. A population of host cells transduced with any the lentiviral vector of any one of additional embodiments 88-95.
[0941] Additional Embodiment 97. A method of transducing a population of host cells comprising: obtaining a population of host cells and contacting the obtained population of host cells with the lentiviral vector of any one of additional embodiments 88-94.
[0942] Additional Embodiment 98. The method of additional embodiment 97, wherein the transduction occurs ex vivo.
[0943] Additional Embodiment 99. A pharmaceutical composition comprising the transduced host cells of additional embodiment 97 and a pharmaceutically acceptable excipient or carrier.
[0944] Additional Embodiment 100. A method of treating a mammalian subject comprising administering a therapeutically effective amount of the transduced host cells of additional embodiment 97 or the pharmaceutical composition of additional embodiment 99 to the mammalian subject.
[0945] Additional Embodiment 101. A polypeptide comprising Formula (I):

[A]ᵥ-[B]-[C]_{w}-[R]_{q}-([D]ₓ-[E]_{y})_{z}, (I)
[0946] wherein
   [0947] A comprises an amino acid sequence encoding a secretion signal peptide;
   [0948] B comprises an amino acid sequence having at least 90% sequence identity to a SEQ ID NO: 11;
   [0949] C comprises an amino acid sequence encoding a GPI anchor;
   [0950] R is -(Mₒ(Fc)Nₚ)-, where M and N each independently include between 1 and 6 amino acids, where Fc is a Fc domain, and o and p are each independently 0, 1, or 2;
   [0951] D comprises an amino acid sequence having between 4 and 6 amino acids, or is F(G)ₜF, where each F is the same amino acid, G is an amino acid sequence having 3, 4, or 5 amino acids, and t is an integer ranging from 2-5;
   [0952] E comprises an amino acid sequence having between 1 and 8 amino acids;
   [0953] q is 0 or 1;
   [0954] v is 0 or 1;
   [0955] w is 0 or 1;
   [0956] x is 0 or an integer ranging from 1 to 6;
   [0957] y is 0 or an integer ranging from 1 to 16; and
   [0958] z is 0 or an integer ranging from 1 to 6.
[0959] Additional Embodiment 102. The polypeptide of additional embodiment 101, wherein [A]ᵥ-[B]-[C]_{w} comprises an amino acid sequence having at least 90% sequence identity to SEQ ID NO: 10.
[0960] Additional Embodiment 103. The polypeptide of additional embodiment 101, wherein [A]ᵥ-[B]-[C]_{w} comprises an amino acid sequence having SEQ ID NO: 10.
[0961] Additional Embodiment 104. The polypeptide of additional embodiment 101, wherein A comprises an amino acid sequence having at least 95% identity to any one of SEQ ID NOS: 12 and 33-43.
[0962] Additional Embodiment 105. The polypeptide of additional embodiment 101, wherein A comprises an amino acid sequence having any one of SEQ ID NOS: 12 and 33-43.
[0963] Additional Embodiment 106. The polypeptide of any one of additional embodiments 104 and 105, wherein v is 1 and w is 0.
[0964] Additional Embodiment 107. The polypeptide of any one of additional embodiments 104 to 106, wherein z is 0.
[0965] Additional Embodiment 108. The polypeptide of any one of additional embodiments 104 to 106, wherein x is 0.
[0966] Additional Embodiment 109. The polypeptide of additional embodiment 101, wherein the polypeptide has at least 95% sequence identity to SEQ ID NO: 2.
[0967] Additional Embodiment 110. The polypeptide of additional embodiment 101, wherein the polypeptide comprises SEQ ID NO: 2.
[0968] Additional Embodiment 111. The polypeptide of additional embodiment 101, wherein E comprises at most two amino acids.
[0969] Additional Embodiment 112. The polypeptide of additional embodiment 101, wherein E comprises 1 amino acid.
[0970] Additional Embodiment 113. The polypeptide of any one of additional embodiments 111 and 112, where E comprises aspartic acid.
[0971] Additional Embodiment 114. The polypeptide of any one of additional embodiments 111 to 113, wherein y ranges from between 8 and 12.
[0972] Additional Embodiment 115. The polypeptide of any one of additional embodiments 111 to 113, wherein v is 1 and w is 0.
[0973] Additional Embodiment 116. The polypeptide of any one of additional embodiments 111 to 115, wherein x is 0.
[0974] Additional Embodiment 117. The polypeptide of any one of additional embodiments 111 to 113, where y is 10.
[0975] Additional Embodiment 118. The polypeptide of additional embodiment 101, wherein the polypeptide has at least 95% sequence identity to SEQ ID NO: 3.
[0976] Additional Embodiment 119. The polypeptide of additional embodiment 101, wherein the polypeptide comprises SEQ ID NO: 3.
[0977] Additional Embodiment 120. The polypeptide of additional embodiment 101, D comprises at most 5 amino acids.
[0978] Additional Embodiment 121. The polypeptide of additional embodiment 120, wherein at least three contiguous amino acids of the at most 5 amino acids are the same.
[0979] Additional Embodiment 122. The polypeptide of additional embodiment 121, wherein the at least three contiguous amino acids are each glycine.
[0980] Additional Embodiment 123. The polypeptide of any one of additional embodiments 120 to 122, wherein x is an integer ranging from 1 to 3.
[0981] Additional Embodiment 124. The polypeptide of any one of additional embodiments 120 to 122, wherein x is 2.
[0982] Additional Embodiment 125. The polypeptide of any one of additional embodiments 120 124, wherein y is an integer ranging from between 4 and 8.
[0983] Additional Embodiment 126. The polypeptide of any one of additional embodiments 120 124, wherein y is between 5 and 7.
[0984] Additional Embodiment 127. The polypeptide of any one of additional embodiments 121 124, wherein y is 6.
[0985] Additional Embodiment 128. The polypeptide of any one of additional embodiments 120 127, wherein E comprises 3 amino acids.
[0986] Additional Embodiment 129. The polypeptide of additional embodiment 128, wherein at least 2 contiguous amino acids of the three amino acids are the same.
[0987] Additional Embodiment 130. The polypeptide of any one of additional embodiments 120 129, wherein E comprises -asp-ser-ser-.
[0988] Additional Embodiment 131. The polypeptide of additional embodiment 101, wherein the polypeptide has at least 95% sequence identity to SEQ ID NO: 6.
[0989] Additional Embodiment 132. The polypeptide of additional embodiment 101, wherein the polypeptide comprises SEQ ID NO: 6.
[0990] Additional Embodiment 133. The polypeptide of any one of additional embodiments 120 124, wherein y is between 8 and 12.
[0991] Additional Embodiment 134. The polypeptide of any one of additional embodiments 120 124, wherein y is 10.
[0992] Additional Embodiment 135. The polypeptide of any one of additional embodiments 120-124 and 133-134, wherein E comprises 1 or 2 amino acids.
[0993] Additional Embodiment 136. The polypeptide of any one of additional embodiments 120-124 and 133-135, wherein E comprises 1 amino acid.
[0994] Additional Embodiment 137. The polypeptide of any one of additional embodiments 120-124 and 133-136, where E comprises a single aspartic acid amino acid.
[0995] Additional Embodiment 138. The polypeptide of additional embodiment 101, wherein the polypeptide has at least 95% sequence identity to SEQ ID NO: 4.
[0996] Additional Embodiment 139. The polypeptide of additional embodiment 101, wherein the polypeptide comprises SEQ ID NO: 4.
[0997] Additional Embodiment 140. The polypeptide of additional embodiment 101, where E comprises between 2 and 4 amino acids.
[0998] Additional Embodiment 141. The polypeptide of additional embodiment 140, wherein E comprises 3 amino acids.
[0999] Additional Embodiment 142. The polypeptide of any one of additional embodiments 140-141, wherein at least 2 contiguous amino acids of the 3 amino acids are the same.
[1000] Additional Embodiment 143. The polypeptide of any one of additional embodiments 140-142, wherein y ranges from 4 to 8.
[1001] Additional Embodiment 144. The polypeptide of any one of additional embodiments 140-143, wherein y ranges from 5 to 7.
[1002] Additional Embodiment 145. The polypeptide of any one of additional embodiments 140-144, wherein y is 6.
[1003] Additional Embodiment 146. The polypeptide of any one of additional embodiments 140-145, wherein E comprises -asp-ser-ser-.
[1004] Additional Embodiment 147. The polypeptide of any one of additional embodiments 140-146, wherein v is 1 and w is 0.
[1005] Additional Embodiment 148. The polypeptide of additional embodiment 101, wherein the polypeptide has at least 95% sequence identity to any one of SEQ ID NOS: 5 and 44-54.
[1006] Additional Embodiment 149. The polypeptide of additional embodiment 101, wherein the polypeptide comprises any one of SEQ ID NOS: 5 and 44-54.
[1007] Additional Embodiment 150. The polypeptide of any one of additional embodiments 140-147, wherein the amino acid sequence encoding the GPI anchor has at least 95% sequence identity to SEQ ID NO: 13.
[1008] Additional Embodiment 151. The polypeptide of any one of additional embodiments 140-147, wherein the amino acid sequence encoding the GPI anchor has SEQ ID NO: 14.
[1009] Additional Embodiment 152. The polypeptide of additional embodiment 101, wherein the polypeptide has at least 95% sequence identity to SEQ ID NO: 8.
[1010] Additional Embodiment 153. The polypeptide of additional embodiment 101, wherein the polypeptide comprises SEQ ID NO: 8.
[1011] Additional Embodiment 154. The polypeptide of any one of additional embodiments 111-114, wherein v is 1 and w is 1.
[1012] Additional Embodiment 155. The polypeptide of additional embodiment 154, wherein the amino acid sequence encoding the GPI anchor has at least 95% sequence identity to SEQ ID NO: 13.
[1013] Additional Embodiment 156. The polypeptide of additional embodiment 154, the amino acid sequence encoding the GPI anchor has SEQ ID NO: 14.
[1014] Additional Embodiment 157. The polypeptide of additional embodiment 101, wherein the polypeptide has at least 95% sequence identity to SEQ ID NO: 7.
[1015] Additional Embodiment 158. The polypeptide of additional embodiment 101, wherein the polypeptide comprises SEQ ID NO: 7.
[1016] Additional Embodiment 159. The polypeptide of additional embodiment 101, wherein R comprises at least 99% identity to that of SEQ ID NO: 9.
[1017] Additional Embodiment 160. The polypeptide of additional embodiment 101, wherein R comprises SEQ ID NO: 9.
[1018] Additional Embodiment 161. The polypeptide of additional embodiment 101, wherein o, p, and q are each 1.
[1019] Additional Embodiment 162. The polypeptide of additional embodiment 161, wherein M comprises 2 amino acids; and wherein N comprises two amino acids; and wherein M and N are different.
[1020] Additional Embodiment 163. The polypeptide of additional embodiment 162, wherein M is -L-K-.
[1021] Additional Embodiment 164. The polypeptide of additional embodiment 162, wherein N is -D-I-.
[1022] Additional Embodiment 165. The polypeptide of additional embodiment 101, wherein [R] is -[L-K]-Fc-[D-I]-, and wherein Fc comprises at least 99% identity to SEQ ID NO: 130.
[1023] Additional Embodiment 166. The polypeptide of additional embodiment 101, wherein the polypeptide does not comprise a terminal poly-Asp.
[1024] Additional Embodiment 167. The polypeptide of additional embodiment 101, wherein the polypeptide does not comprise ten to sixteen contiguous aspartic acid residues.
[1025] Additional Embodiment 168. The polypeptide of additional embodiment 101, wherein the polypeptide does not comprise a terminal poly-Asp having ten to sixteen contiguous aspartic acid residues.
[1026] Additional Embodiment 169. The polypeptide of additional embodiment 101, wherein the polypeptide does not a GPI signal peptide.
[1027] Additional Embodiment 170. The polypeptide of additional embodiment 101, wherein the polypeptide comprises seventeen or more contiguous aspartic acid residues.
[1028] Additional Embodiment 171. The polypeptide of additional embodiment 101, wherein the polypeptide comprises a terminal poly-Asp having seventeen or more contiguous aspartic acid residues, and optionally an Fc domain.
[1029] Additional Embodiment 172. The polypeptide of additional embodiment 101, wherein the polypeptide comprises ten to sixteen contiguous negatively charged amino acids, wherein the negatively charged amino acids are other than aspartic acid.
[1030] Additional Embodiment 173. The polypeptide of additional embodiment 101, wherein the polypeptide comprises ten to sixteen contiguous glutamic acid residues.
[1031] Additional Embodiment 174. The polypeptide of additional embodiment 101, wherein [E] comprises at least two different amino acids.
[1032] Additional Embodiment 175. An expression vector comprising a nucleotide sequence encoding the polypeptide of any one of additional embodiments 101 to 175.

The application's sequence listing, which the Patent Office published only in electronic form, follows.

SEQUENCE LISTING (131 sequences)

SEQ ID NO: 1 - protein, 743 aa, synthetic construct
  REGION 1..743: note = Synthetic: RMP-001
MISPFLVLAIGTCLTNSLVPEKEKDPKYWRDQAQETLKYALELQKLNTNVAKNVIMFLGDGMGVSTVTAARILKGQLHHNPGEETRLEMDKFPFVALSKTYNTNAQVPDSAGTATAYLCGVKANEGTVGVSAATERSRCNTTQGNEVTSILRWAKDAGKSVGIVTTTRVNHATPSAAYAHSADRDWYSDNEMPPEALSQGCKDIAYQLMHNIRDIDVIMGGGRKYMYPKNKTDVEYESDEKARGTRLDGLDLVDTWKSFKPRYKHSHFIWNRTELLTLDPHNVDYLLGLFEPGDMQYELNRNNVTDPSLSEMVVVAIQILRKNPKGFFLLVEGGRIDHGHHEGKAKQALHEAVEMDRAIGQAGSLTSSEDTLTVVTADHSHVFTFGGYTPRGNSIFGLAPMLSDTDKKPFTAILYGNGPGYKVVGGERENVSMVDYAHNNYQAQSAVPLRHETHGGEDVAVFSKGPMAHLLHGVHEQNYVPHVMAYAACIGANLGHCAPASSLKDKTHTCPPCPAPELLGGPSVFLFPPKPKDTLMISRTPEVTCVVVDVSHEDPEVKFNWYVDGVEVHNAKTKPREEQYNSTYRVVSVLTVLHQDWLNGKEYKCKVSNKALPAPIEKTISKAKGQPREPQVYTLPPSRDELTKNQVSLTCLVKGFYPSDIAVEWESNGQPENNYKTTPPVLDSDGSFFLYSKLTVDKSRWQQGNVFSCSVMHEALHNHYTQKSLSLSPGKDIDDDDDDDDDD

SEQ ID NO: 2 - protein, 502 aa, Homo sapiens
  SITE 1..502: note = RMP-002
MISPFLVLAIGTCLTNSLVPEKEKDPKYWRDQAQETLKYALELQKLNTNVAKNVIMFLGDGMGVSTVTAARILKGQLHHNPGEETRLEMDKFPFVALSKTYNTNAQVPDSAGTATAYLCGVKANEGTVGVSAATERSRCNTTQGNEVTSILRWAKDAGKSVGIVTTTRVNHATPSAAYAHSADRDWYSDNEMPPEALSQGCKDIAYQLMHNIRDIDVIMGGGRKYMYPKNKTDVEYESDEKARGTRLDGLDLVDTWKSFKPRYKHSHFIWNRTELLTLDPHNVDYLLGLFEPGDMQYELNRNNVTDPSLSEMVVVAIQILRKNPKGFFLLVEGGRIDHGHHEGKAKQALHEAVEMDRAIGQAGSLTSSEDTLTVVTADHSHVFTFGGYTPRGNSIFGLAPMLSDTDKKPFTAILYGNGPGYKVVGGERENVSMVDYAHNNYQAQSAVPLRHETHGGEDVAVFSKGPMAHLLHGVHEQNYVPHVMAYAACIGANLGHCAPASS

SEQ ID NO: 3 - protein, 512 aa, synthetic construct
  REGION 1..512: note = Synthetic: RMP-003
MISPFLVLAIGTCLTNSLVPEKEKDPKYWRDQAQETLKYALELQKLNTNVAKNVIMFLGDGMGVSTVTAARILKGQLHHNPGEETRLEMDKFPFVALSKTYNTNAQVPDSAGTATAYLCGVKANEGTVGVSAATERSRCNTTQGNEVTSILRWAKDAGKSVGIVTTTRVNHATPSAAYAHSADRDWYSDNEMPPEALSQGCKDIAYQLMHNIRDIDVIMGGGRKYMYPKNKTDVEYESDEKARGTRLDGLDLVDTWKSFKPRYKHSHFIWNRTELLTLDPHNVDYLLGLFEPGDMQYELNRNNVTDPSLSEMVVVAIQILRKNPKGFFLLVEGGRIDHGHHEGKAKQALHEAVEMDRAIGQAGSLTSSEDTLTVVTADHSHVFTFGGYTPRGNSIFGLAPMLSDTDKKPFTAILYGNGPGYKVVGGERENVSMVDYAHNNYQAQSAVPLRHETHGGEDVAVFSKGPMAHLLHGVHEQNYVPHVMAYAACIGANLGHCAPASSDDDDDDDDDD

SEQ ID NO: 4 - protein, 522 aa, synthetic construct
  REGION 1..522: note = Synthetic: RMP-004
MISPFLVLAIGTCLTNSLVPEKEKDPKYWRDQAQETLKYALELQKLNTNVAKNVIMFLGDGMGVSTVTAARILKGQLHHNPGEETRLEMDKFPFVALSKTYNTNAQVPDSAGTATAYLCGVKANEGTVGVSAATERSRCNTTQGNEVTSILRWAKDAGKSVGIVTTTRVNHATPSAAYAHSADRDWYSDNEMPPEALSQGCKDIAYQLMHNIRDIDVIMGGGRKYMYPKNKTDVEYESDEKARGTRLDGLDLVDTWKSFKPRYKHSHFIWNRTELLTLDPHNVDYLLGLFEPGDMQYELNRNNVTDPSLSEMVVVAIQILRKNPKGFFLLVEGGRIDHGHHEGKAKQALHEAVEMDRAIGQAGSLTSSEDTLTVVTADHSHVFTFGGYTPRGNSIFGLAPMLSDTDKKPFTAILYGNGPGYKVVGGERENVSMVDYAHNNYQAQSAVPLRHETHGGEDVAVFSKGPMAHLLHGVHEQNYVPHVMAYAACIGANLGHCAPASSGGGGSGGGGSDDDDDDDDDD

SEQ ID NO: 5 - protein, 520 aa, synthetic construct
  REGION 1..520: note = Synthetic: RMP-005
MISPFLVLAIGTCLTNSLVPEKEKDPKYWRDQAQETLKYALELQKLNTNVAKNVIMFLGDGMGVSTVTAARILKGQLHHNPGEETRLEMDKFPFVALSKTYNTNAQVPDSAGTATAYLCGVKANEGTVGVSAATERSRCNTTQGNEVTSILRWAKDAGKSVGIVTTTRVNHATPSAAYAHSADRDWYSDNEMPPEALSQGCKDIAYQLMHNIRDIDVIMGGGRKYMYPKNKTDVEYESDEKARGTRLDGLDLVDTWKSFKPRYKHSHFIWNRTELLTLDPHNVDYLLGLFEPGDMQYELNRNNVTDPSLSEMVVVAIQILRKNPKGFFLLVEGGRIDHGHHEGKAKQALHEAVEMDRAIGQAGSLTSSEDTLTVVTADHSHVFTFGGYTPRGNSIFGLAPMLSDTDKKPFTAILYGNGPGYKVVGGERENVSMVDYAHNNYQAQSAVPLRHETHGGEDVAVFSKGPMAHLLHGVHEQNYVPHVMAYAACIGANLGHCAPASSDSSDSSDSSDSSDSSDSS

SEQ ID NO: 6 - protein, 530 aa, synthetic construct
  REGION 1..530: note = Synthetic: RMP-006
MISPFLVLAIGTCLTNSLVPEKEKDPKYWRDQAQETLKYALELQKLNTNVAKNVIMFLGDGMGVSTVTAARILKGQLHHNPGEETRLEMDKFPFVALSKTYNTNAQVPDSAGTATAYLCGVKANEGTVGVSAATERSRCNTTQGNEVTSILRWAKDAGKSVGIVTTTRVNHATPSAAYAHSADRDWYSDNEMPPEALSQGCKDIAYQLMHNIRDIDVIMGGGRKYMYPKNKTDVEYESDEKARGTRLDGLDLVDTWKSFKPRYKHSHFIWNRTELLTLDPHNVDYLLGLFEPGDMQYELNRNNVTDPSLSEMVVVAIQILRKNPKGFFLLVEGGRIDHGHHEGKAKQALHEAVEMDRAIGQAGSLTSSEDTLTVVTADHSHVFTFGGYTPRGNSIFGLAPMLSDTDKKPFTAILYGNGPGYKVVGGERENVSMVDYAHNNYQAQSAVPLRHETHGGEDVAVFSKGPMAHLLHGVHEQNYVPHVMAYAACIGANLGHCAPASSGGGGSGGGGSDSSDSSDSSDSSDSSDSS

SEQ ID NO: 7 - protein, 534 aa, synthetic construct
  REGION 1..534: note = Synthetic: RMP-007
MISPFLVLAIGTCLTNSLVPEKEKDPKYWRDQAQETLKYALELQKLNTNVAKNVIMFLGDGMGVSTVTAARILKGQLHHNPGEETRLEMDKFPFVALSKTYNTNAQVPDSAGTATAYLCGVKANEGTVGVSAATERSRCNTTQGNEVTSILRWAKDAGKSVGIVTTTRVNHATPSAAYAHSADRDWYSDNEMPPEALSQGCKDIAYQLMHNIRDIDVIMGGGRKYMYPKNKTDVEYESDEKARGTRLDGLDLVDTWKSFKPRYKHSHFIWNRTELLTLDPHNVDYLLGLFEPGDMQYELNRNNVTDPSLSEMVVVAIQILRKNPKGFFLLVEGGRIDHGHHEGKAKQALHEAVEMDRAIGQAGSLTSSEDTLTVVTADHSHVFTFGGYTPRGNSIFGLAPMLSDTDKKPFTAILYGNGPGYKVVGGERENVSMVDYAHNNYQAQSAVPLRHETHGGEDVAVFSKGPMAHLLHGVHEQNYVPHVMAYAACIGANLGHCAPASSAGSLAADPAATAAALYPLSVLFDDDDDDDDDD

SEQ ID NO: 8 - protein, 545 aa, synthetic construct
  REGION 1..545: note = Synthetic: RMP-008
MISPFLVLAIGTCLTNSLVPEKEKDPKYWRDQAQETLKYALELQKLNTNVAKNVIMFLGDGMGVSTVTAARILKGQLHHNPGEETRLEMDKFPFVALSKTYNTNAQVPDSAGTATAYLCGVKANEGTVGVSAATERSRCNTTQGNEVTSILRWAKDAGKSVGIVTTTRVNHATPSAAYAHSADRDWYSDNEMPPEALSQGCKDIAYQLMHNIRDIDVIMGGGRKYMYPKNKTDVEYESDEKARGTRLDGLDLVDTWKSFKPRYKHSHFIWNRTELLTLDPHNVDYLLGLFEPGDMQYELNRNNVTDPSLSEMVVVAIQILRKNPKGFFLLVEGGRIDHGHHEGKAKQALHEAVEMDRAIGQAGSLTSSEDTLTVVTADHSHVFTFGGYTPRGNSIFGLAPMLSDTDKKPFTAILYGNGPGYKVVGGERENVSMVDYAHNNYQAQSAVPLRHETHGGEDVAVFSKGPMAHLLHGVHEQNYVPHVMAYAACIGANLGHCAPASSAGSLAADPAATAAALYPLSVLFDSSDSSDSSDSSDSSDSSDSS

SEQ ID NO: 9 - protein, 231 aa, Homo sapiens
LKDKTHTCPPCPAPELLGGPSVFLFPPKPKDTLMISRTPEVTCVVVDVSHEDPEVKFNWYVDGVEVHNAKTKPREEQYNSTYRVVSVLTVLHQDWLNGKEYKCKVSNKALPAPIEKTISKAKGQPREPQVYTLPPSREEMTKNQVSLTCLVKGFYPSDIAVEWESNGQPENNYKTTPPVLDSDGSFFLYSKLTVDKSRWQQGNVFSCSVMHEALHNHYTQKSLSLSPGKDI

SEQ ID NO: 10 - protein, 524 aa, Homo sapiens
  SITE 1..524: note = HUMAN Alkaline phosphatase, tissue-nonspecific isozyme
MISPFLVLAIGTCLTNSLVPEKEKDPKYWRDQAQETLKYALELQKLNTNVAKNVIMFLGDGMGVSTVTAARILKGQLHHNPGEETRLEMDKFPFVALSKTYNTNAQVPDSAGTATAYLCGVKANEGTVGVSAATERSRCNTTQGNEVTSILRWAKDAGKSVGIVTTTRVNHATPSAAYAHSADRDWYSDNEMPPEALSQGCKDIAYQLMHNIRDIDVIMGGGRKYMYPKNKTDVEYESDEKARGTRLDGLDLVDTWKSFKPRYKHSHFIWNRTELLTLDPHNVDYLLGLFEPGDMQYELNRNNVTDPSLSEMVVVAIQILRKNPKGFFLLVEGGRIDHGHHEGKAKQALHEAVEMDRAIGQAGSLTSSEDTLTVVTADHSHVFTFGGYTPRGNSIFGLAPMLSDTDKKPFTAILYGNGPGYKVVGGERENVSMVDYAHNNYQAQSAVPLRHETHGGEDVAVFSKGPMAHLLHGVHEQNYVPHVMAYAACIGANLGHCAPASSAGSLAAGPLLLALALYPLSVLF

SEQ ID NO: 11 - protein, 485 aa, synthetic construct
  REGION 1..485: note = Synthetic
LVPEKEKDPKYWRDQAQETLKYALELQKLNTNVAKNVIMFLGDGMGVSTVTAARILKGQLHHNPGEETRLEMDKFPFVALSKTYNTNAQVPDSAGTATAYLCGVKANEGTVGVSAATERSRCNTTQGNEVTSILRWAKDAGKSVGIVTTTRVNHATPSAAYAHSADRDWYSDNEMPPEALSQGCKDIAYQLMHNIRDIDVIMGGGRKYMYPKNKTDVEYESDEKARGTRLDGLDLVDTWKSFKPRYKHSHFIWNRTELLTLDPHNVDYLLGLFEPGDMQYELNRNNVTDPSLSEMVVVAIQILRKNPKGFFLLVEGGRIDHGHHEGKAKQALHEAVEMDRAIGQAGSLTSSEDTLTVVTADHSHVFTFGGYTPRGNSIFGLAPMLSDTDKKPFTAILYGNGPGYKVVGGERENVSMVDYAHNNYQAQSAVPLRHETHGGEDVAVFSKGPMAHLLHGVHEQNYVPHVMAYAACIGANLGHCAPASS

SEQ ID NO: 12 - protein, 17 aa, Homo sapiens
  SITE 1..17: note = signal peptide
MISPFLVLAIGTCLTNS

SEQ ID NO: 13 - protein, 22 aa, Homo sapiens
  SITE 1..22: note = GPI anchor
AGSLAAGPLLLALALYPLSVLF

SEQ ID NO: 14 - protein, 22 aa, synthetic construct
  REGION 1..22: note = Synthetic: mutated GPI anchor
AGSLAADPAATAAALYPLSVLF

SEQ ID NO: 15 - DNA, 10746 bp, synthetic construct
  misc_feature 1..10746: note = Synthetic: RMP001
  source 1..10746: mol_type = other DNA
gtactgggtctctctggttagaccagatctgagcctgggagctctctggctaactagggaacccactgcttaagcctcaataaagcttgccttgagtgcttcaagtagtgtgtgcccgtctgttgtgtgactctggtaactagagatccctcagacccttttagtcagtgtggaaaatctctagcagtggcgcccgaacagggacttgaaagcgaaagggaaaccagaggagctctctcgacgcaggactcggcttgctgaagcgcgcacggcaagaggcgaggggcggcgactggtgagtacgccaaaaattttgactagcggaggctagaaggagagagatgggtgcgagagcgtcagtattaagcgggggagaattagatcgcgatgggaaaaaattcggttaaggccagggggaaagaaaaaatataaattaaaacatatagtatgggcaagcagggagctagaacgattcgcagttaatcctggcctgttagaaacatcagaaggctgtagacaaatactgggacagctacaaccatcccttcagacaggatcagaagaacttagatcattatataatacagtagcaaccctctattgtgtgcatcaaaggatagagataaaagacaccaaggaagctttagacaagatagaggaagagcaaaacaaaagtaagaccaccgcacagcaagcggccgctgatcttcagacctggaggaggagatatgagggacaattggagaagtgaattatataaatataaagtagtaaaaattgaaccattaggagtagcacccaccaaggcaaagagaagagtggtgcagagagaaaaaagagcagtgggaataggagctttgttccttgggttcttgggagcagcaggaagcactatgggcgcagcgtcaatgacgctgacggtacaggccagacaattattgtctggtatagtgcagcagcagaacaatttgctgagggctattgaggcgcaacagcatctgttgcaactcacagtctggggcatcaagcagctccaggcaagaatcctggctgtggaaagatacctaaaggatcaacagctcctggggatttggggttgctctggaaaactcatttgcaccactgctgtgccttggaatgctagttggagtaataaatctctggaacagatttggaatcacacgacctggatggagtgggacagagaaattaacaattacacaagcttaatacactccttaattgaagaatcgcaaaaccagcaagaaaagaatgaacaagaattattggaattagataaatgggcaagtttgtggaattggtttaacataacaaattggctgtggtatataaaattattcataatgatagtaggaggcttggtaggtttaagaatagtttttgctgtactttctatagtgaatagagttaggcagggatattcaccattatcgtttcagacccacctcccaaccccgaggggacccgacaggcccgaaggaatagaagaagaaggtggagagagagacagagacagatccattcgattagtgaacggatcggcactgcgtgcgccaattctgcagacaaatggcagtattcatccacaattttaaaagaaaaggggggattggggggtacagtgcaggggaaagaatagtagacataatagcaacagacatacaaactaaagaattacaaaaacaaattacaaaaattcaaaattttcgggtttattacagggacagcagagatccagtttggttaattaaggatctgcgatcgctccggtgcccgtcagtgggcagagcgcacatcgcccacagtccccgagaagttggggggaggggtcggcaattgaaccggtgcctagagaaggtggcgcggggtaaactgggaaagtgatgtcgtgtactggctccgcctttttcccgagggtgggggagaaccgtatataagtgcagtagtcgccgtgaacgttctttttcgcaacgggtttgccgccagaacacagctgaagcttcgaggggctcgcatctctccttcacgcgcccgccgccctacctgaggccgccatccacgccggttgagtcgcgttctgccgcctcccgcctgtggtgcctcctgaactgcgtccgccgtctaggtaagtttaaagctcaggtcgagaccgggcctttgtccggcgctcccttggagcctacctagactcagccggctctccacgctttgcctgaccctgcttgctcaactctacgtctttgtttcgttttctgttctgcgccgttacagatccaagctgtgaccggcgcctaggatccccgggtaccggtcgtacgttcgaagctagcatgataagtcccttcctcgtccttgccataggtacctgtctcaccaattcacttgtgccggagaaggaaaaagacccgaagtactggagggaccaggcccaggagacactcaagtatgctttggagctgcagaagctcaacaccaatgtcgccaaaaacgtgataatgttcctcggtgacggcatgggggtatctactgtaacggcggcacgcatcctgaaaggacagctgcaccacaatccaggcgaggagacccggctggaaatggacaagtttccattcgtggctttgtccaaaacttacaacaccaacgcacaagttcctgattctgccggtacggccactgcctacctctgtggcgtcaaggcaaatgaggggactgtgggggtatctgcggcaactgagaggagccgatgcaacacgacgcagggtaacgaggtgacatctatcctgaggtgggcaaaggacgcgggaaaaagcgtcggaatagtaacgaccacaagggtaaaccacgctacccctagcgcagcgtatgcacattcagccgatcgggattggtacagtgacaatgaaatgccgcctgaagctctgtcccagggttgcaaagatatcgcctatcagctgatgcataatatccgcgatattgacgtaatcatggggggtggacgaaaatatatgtacccaaaaaataaaacagatgtagaatatgaatctgatgagaaggcccggggtacaaggcttgatggtctcgatcttgtcgacacgtggaaatcattcaaacctcggtataaacacagccattttatctggaataggactgaattgcttacgcttgatccacacaacgtagactatttgctgggcctttttgagccgggagatatgcagtacgaacttaaccggaacaatgtgactgacccttctcttagcgagatggtggtagtggcgattcagatactcagaaaaaatcccaagggtttttttctcctggtcgagggcggaagaatcgatcatggacatcacgaaggaaaagcgaagcaagcacttcatgaagccgtagagatggatagggcaataggtcaggcaggctcacttacgtcaagtgaagatacccttacggtggtgacagctgaccacagccacgtctttactttcggcggctataccccccgaggcaattcaatctttgggttggcgcccatgctttcagatactgataagaaaccttttacagccatcttgtatggtaatgggcctgggtataaggtagttggtggtgagagggagaatgtatcaatggtcgattacgcacataataactaccaagctcagtcagcagtacctctgaggcatgaaacacacggcggagaggacgtagcagtattttcaaaaggcccaatggcccatctgctgcatggggtacatgagcaaaattatgtgccccatgtgatggcatatgcagcctgcatcggagcaaatctcgggcactgtgctcccgcctcaagtctcaaagacaaaacacacacttgtccaccttgcccggcacctgaacttctgggcggcccgagcgtttttttgttccctcctaaacctaaggacacgctcatgatcagccgcacgccagaggttacctgtgtagtggtggatgtcagccacgaggatccggaagtaaaattcaactggtatgtagatggggtggaggttcacaatgccaaaaccaagccacgagaggaacagtacaatagtacttaccgggtcgtgtctgtattgaccgtcctgcatcaggattggttgaacgggaaagaatataagtgcaaggtgagcaacaaagcacttccggccccaatagagaaaacaattagtaaagcaaaaggacaaccacgggaaccgcaagtttatacactgccgccctctcgagacgagctgaccaaaaatcaggttagccttacatgtttggtcaaggggttctacccgagtgatattgcagtggaatgggaatccaacggtcaaccagaaaataactacaaaactactccgccggtgttggattcagacggctctttctttctgtatagcaaactcactgttgacaagtcaagatggcagcagggcaatgtatttagctgtagtgttatgcacgaagctcttcataaccactacacacaaaagtcactttctctttccccaggaaaagacatcgatgacgatgacgatgatgacgacgacgatgaattcgatatcaagcttatcgataatcaacctctggattacaaaatttgtgaaagattgactggtattcttaactatgttgctccttttacgctatgtggatacgctgctttaatgcctttgtatcatgctattgcttcccgtatggctttcattttctcctccttgtataaatcctggttgctgtctctttatgaggagttgtggcccgttgtcaggcaacgtggcgtggtgtgcactgtgtttgctgacgcaacccccactggttggggcattgccaccacctgtcagctcctttccgggactttcgctttccccctccctattgccacggcggaactcatcgccgcctgccttgcccgctgctggacaggggctcggctgttgggcactgacaattccgtggtgttgtcggggaaatcatcgtcctttccttggctgctcgcctgtgttgccacctggattctgcgcgggacgtccttctgctacgtcccttcggccctcaatccagcggaccttccttcccgcggcctgctgccggctctgcggcctcttccgcgtcttcgccttcgccctcagacgagtcggatctccctttgggccgcctccccgcatcgataccgtcgacctcgatcgagacctagaaaaacatggagcaatcacaagtagcaatacagcagctaccaatgctgattgtgcctggctagaagcacaagaggaggaggaggtgggttttccagtcacacctcaggtacctttaagaccaatgacttacaaggcagctgtagatcttagccactttttaaaagaaaaggggggactggaagggctaattcactcccaacgaagacaagatatccttgatctgtggatctaccacacacaaggctacttccctgattggcagaactacacaccagggccagggatcagatatccactgacctttggatggtgctacaagctagtaccagttgagcaagagaaggtagaagaagccaatgaaggagagaacacccgcttgttacaccctgtgagcctgcatgggatggatgacccggagagagaagtattagagtggaggtttgacagccgcctagcatttcatcacatggcccgagagctgcatccggactgtactgggtctctctggttagaccagatctgagcctgggagctctctggctaactagggaacccactgcttaagcctcaataaagcttgccttgagtgcttcaagtagtgtgtgcccgtctgttgtgtgactctggtaactagagatccctcagacccttttagtcagtgtggaaaatctctagcagggcccgtttaaacccgctgatcagcctcgactgtgccttctagttgccagccatctgttgtttgcccctcccccgtgccttccttgaccctggaaggtgccactcccactgtcctttcctaataaaatgaggaaattgcatcgcattgtctgagtaggtgtcattctattctggggggtggggtggggcaggacagcaagggggaggattgggaagacaatagcaggcatgctggggatgcggtgggctctatggcttctgaggcggaaagaaccagctggggctctagggggtatccccacgcgccctgtagcggcgcattaagcgcggcgggtgtggtggttacgcgcagcgtgaccgctacacttgccagcgccctagcgcccgctcctttcgctttcttcccttcctttctcgccacgttcgccggctttccccgtcaagctctaaatcgggggctccctttagggttccgatttagtgctttacggcacctcgaccccaaaaaacttgattagggtgatggttcacgtagtgggccatcgccctgatagacggtttttcgccctttgacgttggagtccacgttctttaatagtggactcttgttccaaactggaacaacactcaaccctatctcggtctattcttttgatttataagggattttgccgatttcggcctattggttaaaaaatgagctgatttaacaaaaatttaacgcgaattaattctgtggaatgtgtgtcagttagggtgtggaaagtccccaggctccccagcaggcagaagtatgcaaagcatgcatctcaattagtcagcaaccaggtgtggaaagtccccaggctccccagcaggcagaagtatgcaaagcatgcatctcaattagtcagcaaccatagtcccgcccctaactccgcccatcccgcccctaactccgcccagttccgcccattctccgccccatggctgactaattttttttatttatgcagaggccgaggccgcctctgcctctgagctattccagaagtagtgaggaggcttttttggaggcctaggcttttgcaaaaagctcccgggagcttgtatatccattttcggatctgatcagcacgtgttgacaattaatcatcggcatagtatatcggcatagtataatacgacaaggtgaggaactaaaccatggccaagttgaccagtgccgttccggtgctcaccgcgcgcgacgtcgccggagcggtcgagttctggaccgaccggctcgggttctcccgggacttcgtggaggacgacttcgccggtgtggtccgggacgacgtgaccctgttcatcagcgcggtccaggaccaggtggtgccggacaacaccctggcctgggtgtgggtgcgcggcctggacgagctgtacgccgagtggtcggaggtcgtgtccacgaacttccgggacgcctccgggccggccatgaccgagatcggcgagcagccgtgggggcgggagttcgccctgcgcgacccggccggcaactgcgtgcacttcgtggccgaggagcaggactgacacgtgctacgagatttcgattccaccgccgccttctatgaaaggttgggcttcggaatcgttttccgggacgccggctggatgatcctccagcgcggggatctcatgctggagttcttcgcccaccccaacttgtttattgcagcttataatggttacaaataaagcaatagcatcacaaatttcacaaataaagcatttttttcactgcattctagttgtggtttgtccaaactcatcaatgtatcttatcatgtctgtataccgtcgacctctagctagagcttggcgtaatcatggtcatagctgtttcctgtgtgaaattgttatccgctcacaattccacacaacatacgagccggaagcataaagtgtaaagcctggggtgcctaatgagtgagctaactcacattaattgcgttgcgctcactgcccgctttccagtcgggaaacctgtcgtgccagctgcattaatgaatcggccaacgcgcggggagaggcggtttgcgtattgggcgctcttccgcttcctcgctcactgactcgctgcgctcggtcgttcggctgcggcgagcggtatcagctcactcaaaggcggtaatacggttatccacagaatcaggggataacgcaggaaagaacatgtgagcaaaaggccagcaaaaggccaggaaccgtaaaaaggccgcgttgctggcgtttttccataggctccgcccccctgacgagcatcacaaaaatcgacgctcaagtcagaggtggcgaaacccgacaggactataaagataccaggcgtttccccctggaagctccctcgtgcgctctcctgttccgaccctgccgcttaccggatacctgtccgcctttctcccttcgggaagcgtggcgctttctcatagctcacgctgtaggtatctcagttcggtgtaggtcgttcgctccaagctgggctgtgtgcacgaaccccccgttcagcccgaccgctgcgccttatccggtaactatcgtcttgagtccaacccggtaagacacgacttatcgccactggcagcagccactggtaacaggattagcagagcgaggtatgtaggcggtgctacagagttcttgaagtggtggcctaactacggctacactagaagaacagtatttggtatctgcgctctgctgaagccagttaccttcggaaaaagagttggtagctcttgatccggcaaacaaaccaccgctggtagcggtggtttttttgtttgcaagcagcagattacgcgcagaaaaaaaggatctcaagaagatcctttgatcttttctacggggtctgacgctcagtggaacgaaaactcacgttaagggattttggtcatgagattatcaaaaaggatcttcacctagatccttttaaattaaaaatgaagttttaaatcaatctaaagtatatatgagtaaacttggtctgacagttaccaatgcttaatcagtgaggcacctatctcagcgatctgtctatttcgttcatccatagttgcctgactccccgtcgtgtagataactacgatacgggagggcttaccatctggccccagtgctgcaatgataccgcgagacccacgctcaccggctccagatttatcagcaataaaccagccagccggaagggccgagcgcagaagtggtcctgcaactttatccgcctccatccagtctattaattgttgccgggaagctagagtaagtagttcgccagttaatagtttgcgcaacgttgttgccattgctacaggcatcgtggtgtcacgctcgtcgtttggtatggcttcattcagctccggttcccaacgatcaaggcgagttacatgatcccccatgttgtgcaaaaaagcggttagctccttcggtcctccgatcgttgtcagaagtaagttggccgcagtgttatcactcatggttatggcagcactgcataattctcttactgtcatgccatccgtaagatgcttttctgtgactggtgagtactcaaccaagtcattctgagaatagtgtatgcggcgaccgagttgctcttgcccggcgtcaatacgggataataccgcgccacatagcagaactttaaaagtgctcatcattggaaaacgttcttcggggcgaaaactctcaaggatcttaccgctgttgagatccagttcgatgtaacccactcgtgcacccaactgatcttcagcatcttttactttcaccagcgtttctgggtgagcaaaaacaggaaggcaaaatgccgcaaaaaagggaataagggcgacacggaaatgttgaatactcatactcttcctttttcaatattattgaagcatttatcagggttattgtctcatgagcggatacatatttgaatgtatttagaaaaataaacaaataggggttccgcgcacatttccccgaaaagtgccacctgacgtcgacggatcgggagatctcccgatcccctatggtgcactctcagtacaatctgctctgatgccgcatagttaagccagtatctgctccctgcttgtgtgttggaggtcgctgagtagtgcgcgagcaaaatttaagctacaacaaggcaaggcttgaccgacaattgcatgaagaatctgcttagggttaggcgttttgcgctgcttcgcgatgtacgggccagatatacgcgttgacattgattattgactagttattaatagtaatcaattacggggtcattagttcatagcccatatatggagttccgcgttacataacttacggtaaatggcccgcctggctgaccgcccaacgacccccgcccattgacgtcaataatgacgtatgttcccatagtaacgccaatagggactttccattgacgtcaatgggtggagtatttacggtaaactgcccacttggcagtacatcaagtgtatcatatgccaagtacgccccctattgacgtcaatgacggtaaatggcccgcctggcattatgcccagtacatgaccttatgggactttcctacttggcagtacatctacgtattagtcatcgctattaccatggtgatgcggttttggcagtacatcaatgggcgtggatagcggtttgactcacggggatttccaagtctccaccccattgacgtcaatgggagtttgttttggcaccaaaatcaacgggactttccaaaatgtcgtaacaactccgccccattgacgcaaatgggcggtaggcgtgtacggtgggaggtctatataagcagcgcgttttgcct

SEQ ID NO: 16 - DNA, 10026 bp, synthetic construct
  misc_feature 1..10026: note = Synthetic: RMP002
  source 1..10026: mol_type = other DNA
gtactgggtctctctggttagaccagatctgagcctgggagctctctggctaactagggaacccactgcttaagcctcaataaagcttgccttgagtgcttcaagtagtgtgtgcccgtctgttgtgtgactctggtaactagagatccctcagacccttttagtcagtgtggaaaatctctagcagtggcgcccgaacagggacttgaaagcgaaagggaaaccagaggagctctctcgacgcaggactcggcttgctgaagcgcgcacggcaagaggcgaggggcggcgactggtgagtacgccaaaaattttgactagcggaggctagaaggagagagatgggtgcgagagcgtcagtattaagcgggggagaattagatcgcgatgggaaaaaattcggttaaggccagggggaaagaaaaaatataaattaaaacatatagtatgggcaagcagggagctagaacgattcgcagttaatcctggcctgttagaaacatcagaaggctgtagacaaatactgggacagctacaaccatcccttcagacaggatcagaagaacttagatcattatataatacagtagcaaccctctattgtgtgcatcaaaggatagagataaaagacaccaaggaagctttagacaagatagaggaagagcaaaacaaaagtaagaccaccgcacagcaagcggccgctgatcttcagacctggaggaggagatatgagggacaattggagaagtgaattatataaatataaagtagtaaaaattgaaccattaggagtagcacccaccaaggcaaagagaagagtggtgcagagagaaaaaagagcagtgggaataggagctttgttccttgggttcttgggagcagcaggaagcactatgggcgcagcgtcaatgacgctgacggtacaggccagacaattattgtctggtatagtgcagcagcagaacaatttgctgagggctattgaggcgcaacagcatctgttgcaactcacagtctggggcatcaagcagctccaggcaagaatcctggctgtggaaagatacctaaaggatcaacagctcctggggatttggggttgctctggaaaactcatttgcaccactgctgtgccttggaatgctagttggagtaataaatctctggaacagatttggaatcacacgacctggatggagtgggacagagaaattaacaattacacaagcttaatacactccttaattgaagaatcgcaaaaccagcaagaaaagaatgaacaagaattattggaattagataaatgggcaagtttgtggaattggtttaacataacaaattggctgtggtatataaaattattcataatgatagtaggaggcttggtaggtttaagaatagtttttgctgtactttctatagtgaatagagttaggcagggatattcaccattatcgtttcagacccacctcccaaccccgaggggacccgacaggcccgaaggaatagaagaagaaggtggagagagagacagagacagatccattcgattagtgaacggatcggcactgcgtgcgccaattctgcagacaaatggcagtattcatccacaattttaaaagaaaaggggggattggggggtacagtgcaggggaaagaatagtagacataatagcaacagacatacaaactaaagaattacaaaaacaaattacaaaaattcaaaattttcgggtttattacagggacagcagagatccagtttggttaattaaggatctgcgatcgctccggtgcccgtcagtgggcagagcgcacatcgcccacagtccccgagaagttggggggaggggtcggcaattgaaccggtgcctagagaaggtggcgcggggtaaactgggaaagtgatgtcgtgtactggctccgcctttttcccgagggtgggggagaaccgtatataagtgcagtagtcgccgtgaacgttctttttcgcaacgggtttgccgccagaacacagctgaagcttcgaggggctcgcatctctccttcacgcgcccgccgccctacctgaggccgccatccacgccggttgagtcgcgttctgccgcctcccgcctgtggtgcctcctgaactgcgtccgccgtctaggtaagtttaaagctcaggtcgagaccgggcctttgtccggcgctcccttggagcctacctagactcagccggctctccacgctttgcctgaccctgcttgctcaactctacgtctttgtttcgttttctgttctgcgccgttacagatccaagctgtgaccggcgcctaggatccccgggtaccggtcgtacgttcgaagctagcatgatttcaccattcttagtactggccattggcacctgccttactaactccttagtgccagagaaagagaaagaccccaagtactggcgagaccaagcgcaagagacactgaaatatgccctggagcttcagaagctcaacaccaacgtggctaagaatgtcatcatgttcctgggagatgggatgggtgtctccacagtgacggctgcccgcatcctcaagggtcagctccaccacaaccctggggaggagaccaggctggagatggacaagttccccttcgtggccctctccaagacgtacaacaccaatgcccaggtccctgacagtgccggcaccgccaccgcctacctgtgtggggtgaaggccaatgagggcaccgtgggggtaagcgcagccactgagcgttcccggtgcaacaccacccaggggaacgaggtcacctccatcctgcgctgggccaaggacgctgggaaatctgtgggcattgtgaccaccacgagagtgaaccatgccacccccagcgccgcctacgcccactcggctgaccgggactggtactcagacaacgagatgccccctgaggccttgagccagggctgtaaggacatcgcctaccagctcatgcataacatcagggacattgacgtgatcatggggggtggccggaaatacatgtaccccaagaataaaactgatgtggagtatgagagtgacgagaaagccaggggcacgaggctggacggcctggacctcgttgacacctggaagagcttcaaaccgagatacaagcactcccacttcatctggaaccgcacggaactcctgacccttgacccccacaatgtggactacctattgggtctcttcgagccaggggacatgcagtacgagctgaacaggaacaacgtgacggacccgtcactctccgagatggtggtggtggccatccagatcctgcggaagaaccccaaaggcttcttcttgctggtggaaggaggcagaattgaccacgggcaccatgaaggaaaagccaagcaggccctgcatgaggcggtggagatggaccgggccatcgggcaggcaggcagcttgacctcctcggaagacactctgaccgtggtcactgcggaccattcccacgtcttcacatttggtggatacaccccccgtggcaactctatctttggtctggcccccatgctgagtgacacagacaagaagcccttcactgccatcctgtatggcaatgggcctggctacaaggtggtgggcggtgaacgagagaatgtctccatggtggactatgctcacaacaactaccaggcgcagtctgctgtgcccctgcgccacgagacccacggcggggaggacgtggccgtcttctccaagggccccatggcgcacctgctgcacggcgtccacgagcagaactacgtcccccacgtgatggcgtatgcagcctgcatcggggccaacctcggccactgtgctcctgccagctcgtgagaattcgatatcaagcttatcgataatcaacctctggattacaaaatttgtgaaagattgactggtattcttaactatgttgctccttttacgctatgtggatacgctgctttaatgcctttgtatcatgctattgcttcccgtatggctttcattttctcctccttgtataaatcctggttgctgtctctttatgaggagttgtggcccgttgtcaggcaacgtggcgtggtgtgcactgtgtttgctgacgcaacccccactggttggggcattgccaccacctgtcagctcctttccgggactttcgctttccccctccctattgccacggcggaactcatcgccgcctgccttgcccgctgctggacaggggctcggctgttgggcactgacaattccgtggtgttgtcggggaaatcatcgtcctttccttggctgctcgcctgtgttgccacctggattctgcgcgggacgtccttctgctacgtcccttcggccctcaatccagcggaccttccttcccgcggcctgctgccggctctgcggcctcttccgcgtcttcgccttcgccctcagacgagtcggatctccctttgggccgcctccccgcatcgataccgtcgacctcgatcgagacctagaaaaacatggagcaatcacaagtagcaatacagcagctaccaatgctgattgtgcctggctagaagcacaagaggaggaggaggtgggttttccagtcacacctcaggtacctttaagaccaatgacttacaaggcagctgtagatcttagccactttttaaaagaaaaggggggactggaagggctaattcactcccaacgaagacaagatatccttgatctgtggatctaccacacacaaggctacttccctgattggcagaactacacaccagggccagggatcagatatccactgacctttggatggtgctacaagctagtaccagttgagcaagagaaggtagaagaagccaatgaaggagagaacacccgcttgttacaccctgtgagcctgcatgggatggatgacccggagagagaagtattagagtggaggtttgacagccgcctagcatttcatcacatggcccgagagctgcatccggactgtactgggtctctctggttagaccagatctgagcctgggagctctctggctaactagggaacccactgcttaagcctcaataaagcttgccttgagtgcttcaagtagtgtgtgcccgtctgttgtgtgactctggtaactagagatccctcagacccttttagtcagtgtggaaaatctctagcagggcccgtttaaacccgctgatcagcctcgactgtgccttctagttgccagccatctgttgtttgcccctcccccgtgccttccttgaccctggaaggtgccactcccactgtcctttcctaataaaatgaggaaattgcatcgcattgtctgagtaggtgtcattctattctggggggtggggtggggcaggacagcaagggggaggattgggaagacaatagcaggcatgctggggatgcggtgggctctatggcttctgaggcggaaagaaccagctggggctctagggggtatccccacgcgccctgtagcggcgcattaagcgcggcgggtgtggtggttacgcgcagcgtgaccgctacacttgccagcgccctagcgcccgctcctttcgctttcttcccttcctttctcgccacgttcgccggctttccccgtcaagctctaaatcgggggctccctttagggttccgatttagtgctttacggcacctcgaccccaaaaaacttgattagggtgatggttcacgtagtgggccatcgccctgatagacggtttttcgccctttgacgttggagtccacgttctttaatagtggactcttgttccaaactggaacaacactcaaccctatctcggtctattcttttgatttataagggattttgccgatttcggcctattggttaaaaaatgagctgatttaacaaaaatttaacgcgaattaattctgtggaatgtgtgtcagttagggtgtggaaagtccccaggctccccagcaggcagaagtatgcaaagcatgcatctcaattagtcagcaaccaggtgtggaaagtccccaggctccccagcaggcagaagtatgcaaagcatgcatctcaattagtcagcaaccatagtcccgcccctaactccgcccatcccgcccctaactccgcccagttccgcccattctccgccccatggctgactaattttttttatttatgcagaggccgaggccgcctctgcctctgagctattccagaagtagtgaggaggcttttttggaggcctaggcttttgcaaaaagctcccgggagcttgtatatccattttcggatctgatcagcacgtgttgacaattaatcatcggcatagtatatcggcatagtataatacgacaaggtgaggaactaaaccatggccaagttgaccagtgccgttccggtgctcaccgcgcgcgacgtcgccggagcggtcgagttctggaccgaccggctcgggttctcccgggacttcgtggaggacgacttcgccggtgtggtccgggacgacgtgaccctgttcatcagcgcggtccaggaccaggtggtgccggacaacaccctggcctgggtgtgggtgcgcggcctggacgagctgtacgccgagtggtcggaggtcgtgtccacgaacttccgggacgcctccgggccggccatgaccgagatcggcgagcagccgtgggggcgggagttcgccctgcgcgacccggccggcaactgcgtgcacttcgtggccgaggagcaggactgacacgtgctacgagatttcgattccaccgccgccttctatgaaaggttgggcttcggaatcgttttccgggacgccggctggatgatcctccagcgcggggatctcatgctggagttcttcgcccaccccaacttgtttattgcagcttataatggttacaaataaagcaatagcatcacaaatttcacaaataaagcatttttttcactgcattctagttgtggtttgtccaaactcatcaatgtatcttatcatgtctgtataccgtcgacctctagctagagcttggcgtaatcatggtcatagctgtttcctgtgtgaaattgttatccgctcacaattccacacaacatacgagccggaagcataaagtgtaaagcctggggtgcctaatgagtgagctaactcacattaattgcgttgcgctcactgcccgctttccagtcgggaaacctgtcgtgccagctgcattaatgaatcggccaacgcgcggggagaggcggtttgcgtattgggcgctcttccgcttcctcgctcactgactcgctgcgctcggtcgttcggctgcggcgagcggtatcagctcactcaaaggcggtaatacggttatccacagaatcaggggataacgcaggaaagaacatgtgagcaaaaggccagcaaaaggccaggaaccgtaaaaaggccgcgttgctggcgtttttccataggctccgcccccctgacgagcatcacaaaaatcgacgctcaagtcagaggtggcgaaacccgacaggactataaagataccaggcgtttccccctggaagctccctcgtgcgctctcctgttccgaccctgccgcttaccggatacctgtccgcctttctcccttcgggaagcgtggcgctttctcatagctcacgctgtaggtatctcagttcggtgtaggtcgttcgctccaagctgggctgtgtgcacgaaccccccgttcagcccgaccgctgcgccttatccggtaactatcgtcttgagtccaacccggtaagacacgacttatcgccactggcagcagccactggtaacaggattagcagagcgaggtatgtaggcggtgctacagagttcttgaagtggtggcctaactacggctacactagaagaacagtatttggtatctgcgctctgctgaagccagttaccttcggaaaaagagttggtagctcttgatccggcaaacaaaccaccgctggtagcggtggtttttttgtttgcaagcagcagattacgcgcagaaaaaaaggatctcaagaagatcctttgatcttttctacggggtctgacgctcagtggaacgaaaactcacgttaagggattttggtcatgagattatcaaaaaggatcttcacctagatccttttaaattaaaaatgaagttttaaatcaatctaaagtatatatgagtaaacttggtctgacagttaccaatgcttaatcagtgaggcacctatctcagcgatctgtctatttcgttcatccatagttgcctgactccccgtcgtgtagataactacgatacgggagggcttaccatctggccccagtgctgcaatgataccgcgagacccacgctcaccggctccagatttatcagcaataaaccagccagccggaagggccgagcgcagaagtggtcctgcaactttatccgcctccatccagtctattaattgttgccgggaagctagagtaagtagttcgccagttaatagtttgcgcaacgttgttgccattgctacaggcatcgtggtgtcacgctcgtcgtttggtatggcttcattcagctccggttcccaacgatcaaggcgagttacatgatcccccatgttgtgcaaaaaagcggttagctccttcggtcctccgatcgttgtcagaagtaagttggccgcagtgttatcactcatggttatggcagcactgcataattctcttactgtcatgccatccgtaagatgcttttctgtgactggtgagtactcaaccaagtcattctgagaatagtgtatgcggcgaccgagttgctcttgcccggcgtcaatacgggataataccgcgccacatagcagaactttaaaagtgctcatcattggaaaacgttcttcggggcgaaaactctcaaggatcttaccgctgttgagatccagttcgatgtaacccactcgtgcacccaactgatcttcagcatcttttactttcaccagcgtttctgggtgagcaaaaacaggaaggcaaaatgccgcaaaaaagggaataagggcgacacggaaatgttgaatactcatactcttcctttttcaatattattgaagcatttatcagggttattgtctcatgagcggatacatatttgaatgtatttagaaaaataaacaaataggggttccgcgcacatttccccgaaaagtgccacctgacgtcgacggatcgggagatctcccgatcccctatggtgcactctcagtacaatctgctctgatgccgcatagttaagccagtatctgctccctgcttgtgtgttggaggtcgctgagtagtgcgcgagcaaaatttaagctacaacaaggcaaggcttgaccgacaattgcatgaagaatctgcttagggttaggcgttttgcgctgcttcgcgatgtacgggccagatatacgcgttgacattgattattgactagttattaatagtaatcaattacggggtcattagttcatagcccatatatggagttccgcgttacataacttacggtaaatggcccgcctggctgaccgcccaacgacccccgcccattgacgtcaataatgacgtatgttcccatagtaacgccaatagggactttccattgacgtcaatgggtggagtatttacggtaaactgcccacttggcagtacatcaagtgtatcatatgccaagtacgccccctattgacgtcaatgacggtaaatggcccgcctggcattatgcccagtacatgaccttatgggactttcctacttggcagtacatctacgtattagtcatcgctattaccatggtgatgcggttttggcagtacatcaatgggcgtggatagcggtttgactcacggggatttccaagtctccaccccattgacgtcaatgggagtttgttttggcaccaaaatcaacgggactttccaaaatgtcgtaacaactccgccccattgacgcaaatgggcggtaggcgtgtacggtgggaggtctatataagcagcgcgttttgcct

SEQ ID NO: 17 - DNA, 10056 bp, synthetic construct
  misc_feature 1..10056: note = Synthetic: RMP-003
  source 1..10056: mol_type = other DNA
gtactgggtctctctggttagaccagatctgagcctgggagctctctggctaactagggaacccactgcttaagcctcaataaagcttgccttgagtgcttcaagtagtgtgtgcccgtctgttgtgtgactctggtaactagagatccctcagacccttttagtcagtgtggaaaatctctagcagtggcgcccgaacagggacttgaaagcgaaagggaaaccagaggagctctctcgacgcaggactcggcttgctgaagcgcgcacggcaagaggcgaggggcggcgactggtgagtacgccaaaaattttgactagcggaggctagaaggagagagatgggtgcgagagcgtcagtattaagcgggggagaattagatcgcgatgggaaaaaattcggttaaggccagggggaaagaaaaaatataaattaaaacatatagtatgggcaagcagggagctagaacgattcgcagttaatcctggcctgttagaaacatcagaaggctgtagacaaatactgggacagctacaaccatcccttcagacaggatcagaagaacttagatcattatataatacagtagcaaccctctattgtgtgcatcaaaggatagagataaaagacaccaaggaagctttagacaagatagaggaagagcaaaacaaaagtaagaccaccgcacagcaagcggccgctgatcttcagacctggaggaggagatatgagggacaattggagaagtgaattatataaatataaagtagtaaaaattgaaccattaggagtagcacccaccaaggcaaagagaagagtggtgcagagagaaaaaagagcagtgggaataggagctttgttccttgggttcttgggagcagcaggaagcactatgggcgcagcgtcaatgacgctgacggtacaggccagacaattattgtctggtatagtgcagcagcagaacaatttgctgagggctattgaggcgcaacagcatctgttgcaactcacagtctggggcatcaagcagctccaggcaagaatcctggctgtggaaagatacctaaaggatcaacagctcctggggatttggggttgctctggaaaactcatttgcaccactgctgtgccttggaatgctagttggagtaataaatctctggaacagatttggaatcacacgacctggatggagtgggacagagaaattaacaattacacaagcttaatacactccttaattgaagaatcgcaaaaccagcaagaaaagaatgaacaagaattattggaattagataaatgggcaagtttgtggaattggtttaacataacaaattggctgtggtatataaaattattcataatgatagtaggaggcttggtaggtttaagaatagtttttgctgtactttctatagtgaatagagttaggcagggatattcaccattatcgtttcagacccacctcccaaccccgaggggacccgacaggcccgaaggaatagaagaagaaggtggagagagagacagagacagatccattcgattagtgaacggatcggcactgcgtgcgccaattctgcagacaaatggcagtattcatccacaattttaaaagaaaaggggggattggggggtacagtgcaggggaaagaatagtagacataatagcaacagacatacaaactaaagaattacaaaaacaaattacaaaaattcaaaattttcgggtttattacagggacagcagagatccagtttggttaattaaggatctgcgatcgctccggtgcccgtcagtgggcagagcgcacatcgcccacagtccccgagaagttggggggaggggtcggcaattgaaccggtgcctagagaaggtggcgcggggtaaactgggaaagtgatgtcgtgtactggctccgcctttttcccgagggtgggggagaaccgtatataagtgcagtagtcgccgtgaacgttctttttcgcaacgggtttgccgccagaacacagctgaagcttcgaggggctcgcatctctccttcacgcgcccgccgccctacctgaggccgccatccacgccggttgagtcgcgttctgccgcctcccgcctgtggtgcctcctgaactgcgtccgccgtctaggtaagtttaaagctcaggtcgagaccgggcctttgtccggcgctcccttggagcctacctagactcagccggctctccacgctttgcctgaccctgcttgctcaactctacgtctttgtttcgttttctgttctgcgccgttacagatccaagctgtgaccggcgcctaggatccccgggtaccggtcgtacgttcgaagctagcatgatttcaccattcttagtactggccattggcacctgccttactaactccttagtgccagagaaagagaaagaccccaagtactggcgagaccaagcgcaagagacactgaaatatgccctggagcttcagaagctcaacaccaacgtggctaagaatgtcatcatgttcctgggagatgggatgggtgtctccacagtgacggctgcccgcatcctcaagggtcagctccaccacaaccctggggaggagaccaggctggagatggacaagttccccttcgtggccctctccaagacgtacaacaccaatgcccaggtccctgacagtgccggcaccgccaccgcctacctgtgtggggtgaaggccaatgagggcaccgtgggggtaagcgcagccactgagcgttcccggtgcaacaccacccaggggaacgaggtcacctccatcctgcgctgggccaaggacgctgggaaatctgtgggcattgtgaccaccacgagagtgaaccatgccacccccagcgccgcctacgcccactcggctgaccgggactggtactcagacaacgagatgccccctgaggccttgagccagggctgtaaggacatcgcctaccagctcatgcataacatcagggacattgacgtgatcatggggggtggccggaaatacatgtaccccaagaataaaactgatgtggagtatgagagtgacgagaaagccaggggcacgaggctggacggcctggacctcgttgacacctggaagagcttcaaaccgagatacaagcactcccacttcatctggaaccgcacggaactcctgacccttgacccccacaatgtggactacctattgggtctcttcgagccaggggacatgcagtacgagctgaacaggaacaacgtgacggacccgtcactctccgagatggtggtggtggccatccagatcctgcggaagaaccccaaaggcttcttcttgctggtggaaggaggcagaattgaccacgggcaccatgaaggaaaagccaagcaggccctgcatgaggcggtggagatggaccgggccatcgggcaggcaggcagcttgacctcctcggaagacactctgaccgtggtcactgcggaccattcccacgtcttcacatttggtggatacaccccccgtggcaactctatctttggtctggcccccatgctgagtgacacagacaagaagcccttcactgccatcctgtatggcaatgggcctggctacaaggtggtgggcggtgaacgagagaatgtctccatggtggactatgctcacaacaactaccaggcgcagtctgctgtgcccctgcgccacgagacccacggcggggaggacgtggccgtcttctccaagggccccatggcgcacctgctgcacggcgtccacgagcagaactacgtcccccacgtgatggcgtatgcagcctgcatcggggccaacctcggccactgtgctcctgccagctcggatgatgatgacgatgatgatgatgacgattgagaattcgatatcaagcttatcgataatcaacctctggattacaaaatttgtgaaagattgactggtattcttaactatgttgctccttttacgctatgtggatacgctgctttaatgcctttgtatcatgctattgcttcccgtatggctttcattttctcctccttgtataaatcctggttgctgtctctttatgaggagttgtggcccgttgtcaggcaacgtggcgtggtgtgcactgtgtttgctgacgcaacccccactggttggggcattgccaccacctgtcagctcctttccgggactttcgctttccccctccctattgccacggcggaactcatcgccgcctgccttgcccgctgctggacaggggctcggctgttgggcactgacaattccgtggtgttgtcggggaaatcatcgtcctttccttggctgctcgcctgtgttgccacctggattctgcgcgggacgtccttctgctacgtcccttcggccctcaatccagcggaccttccttcccgcggcctgctgccggctctgcggcctcttccgcgtcttcgccttcgccctcagacgagtcggatctccctttgggccgcctccccgcatcgataccgtcgacctcgatcgagacctagaaaaacatggagcaatcacaagtagcaatacagcagctaccaatgctgattgtgcctggctagaagcacaagaggaggaggaggtgggttttccagtcacacctcaggtacctttaagaccaatgacttacaaggcagctgtagatcttagccactttttaaaagaaaaggggggactggaagggctaattcactcccaacgaagacaagatatccttgatctgtggatctaccacacacaaggctacttccctgattggcagaactacacaccagggccagggatcagatatccactgacctttggatggtgctacaagctagtaccagttgagcaagagaaggtagaagaagccaatgaaggagagaacacccgcttgttacaccctgtgagcctgcatgggatggatgacccggagagagaagtattagagtggaggtttgacagccgcctagcatttcatcacatggcccgagagctgcatccggactgtactgggtctctctggttagaccagatctgagcctgggagctctctggctaactagggaacccactgcttaagcctcaataaagcttgccttgagtgcttcaagtagtgtgtgcccgtctgttgtgtgactctggtaactagagatccctcagacccttttagtcagtgtggaaaatctctagcagggcccgtttaaacccgctgatcagcctcgactgtgccttctagttgccagccatctgttgtttgcccctcccccgtgccttccttgaccctggaaggtgccactcccactgtcctttcctaataaaatgaggaaattgcatcgcattgtctgagtaggtgtcattctattctggggggtggggtggggcaggacagcaagggggaggattgggaagacaatagcaggcatgctggggatgcggtgggctctatggcttctgaggcggaaagaaccagctggggctctagggggtatccccacgcgccctgtagcggcgcattaagcgcggcgggtgtggtggttacgcgcagcgtgaccgctacacttgccagcgccctagcgcccgctcctttcgctttcttcccttcctttctcgccacgttcgccggctttccccgtcaagctctaaatcgggggctccctttagggttccgatttagtgctttacggcacctcgaccccaaaaaacttgattagggtgatggttcacgtagtgggccatcgccctgatagacggtttttcgccctttgacgttggagtccacgttctttaatagtggactcttgttccaaactggaacaacactcaaccctatctcggtctattcttttgatttataagggattttgccgatttcggcctattggttaaaaaatgagctgatttaacaaaaatttaacgcgaattaattctgtggaatgtgtgtcagttagggtgtggaaagtccccaggctccccagcaggcagaagtatgcaaagcatgcatctcaattagtcagcaaccaggtgtggaaagtccccaggctccccagcaggcagaagtatgcaaagcatgcatctcaattagtcagcaaccatagtcccgcccctaactccgcccatcccgcccctaactccgcccagttccgcccattctccgccccatggctgactaattttttttatttatgcagaggccgaggccgcctctgcctctgagctattccagaagtagtgaggaggcttttttggaggcctaggcttttgcaaaaagctcccgggagcttgtatatccattttcggatctgatcagcacgtgttgacaattaatcatcggcatagtatatcggcatagtataatacgacaaggtgaggaactaaaccatggccaagttgaccagtgccgttccggtgctcaccgcgcgcgacgtcgccggagcggtcgagttctggaccgaccggctcgggttctcccgggacttcgtggaggacgacttcgccggtgtggtccgggacgacgtgaccctgttcatcagcgcggtccaggaccaggtggtgccggacaacaccctggcctgggtgtgggtgcgcggcctggacgagctgtacgccgagtggtcggaggtcgtgtccacgaacttccgggacgcctccgggccggccatgaccgagatcggcgagcagccgtgggggcgggagttcgccctgcgcgacccggccggcaactgcgtgcacttcgtggccgaggagcaggactgacacgtgctacgagatttcgattccaccgccgccttctatgaaaggttgggcttcggaatcgttttccgggacgccggctggatgatcctccagcgcggggatctcatgctggagttcttcgcccaccccaacttgtttattgcagcttataatggttacaaataaagcaatagcatcacaaatttcacaaataaagcatttttttcactgcattctagttgtggtttgtccaaactcatcaatgtatcttatcatgtctgtataccgtcgacctctagctagagcttggcgtaatcatggtcatagctgtttcctgtgtgaaattgttatccgctcacaattccacacaacatacgagccggaagcataaagtgtaaagcctggggtgcctaatgagtgagctaactcacattaattgcgttgcgctcactgcccgctttccagtcgggaaacctgtcgtgccagctgcattaatgaatcggccaacgcgcggggagaggcggtttgcgtattgggcgctcttccgcttcctcgctcactgactcgctgcgctcggtcgttcggctgcggcgagcggtatcagctcactcaaaggcggtaatacggttatccacagaatcaggggataacgcaggaaagaacatgtgagcaaaaggccagcaaaaggccaggaaccgtaaaaaggccgcgttgctggcgtttttccataggctccgcccccctgacgagcatcacaaaaatcgacgctcaagtcagaggtggcgaaacccgacaggactataaagataccaggcgtttccccctggaagctccctcgtgcgctctcctgttccgaccctgccgcttaccggatacctgtccgcctttctcccttcgggaagcgtggcgctttctcatagctcacgctgtaggtatctcagttcggtgtaggtcgttcgctccaagctgggctgtgtgcacgaaccccccgttcagcccgaccgctgcgccttatccggtaactatcgtcttgagtccaacccggtaagacacgacttatcgccactggcagcagccactggtaacaggattagcagagcgaggtatgtaggcggtgctacagagttcttgaagtggtggcctaactacggctacactagaagaacagtatttggtatctgcgctctgctgaagccagttaccttcggaaaaagagttggtagctcttgatccggcaaacaaaccaccgctggtagcggtggtttttttgtttgcaagcagcagattacgcgcagaaaaaaaggatctcaagaagatcctttgatcttttctacggggtctgacgctcagtggaacgaaaactcacgttaagggattttggtcatgagattatcaaaaaggatcttcacctagatccttttaaattaaaaatgaagttttaaatcaatctaaagtatatatgagtaaacttggtctgacagttaccaatgcttaatcagtgaggcacctatctcagcgatctgtctatttcgttcatccatagttgcctgactccccgtcgtgtagataactacgatacgggagggcttaccatctggccccagtgctgcaatgataccgcgagacccacgctcaccggctccagatttatcagcaataaaccagccagccggaagggccgagcgcagaagtggtcctgcaactttatccgcctccatccagtctattaattgttgccgggaagctagagtaagtagttcgccagttaatagtttgcgcaacgttgttgccattgctacaggcatcgtggtgtcacgctcgtcgtttggtatggcttcattcagctccggttcccaacgatcaaggcgagttacatgatcccccatgttgtgcaaaaaagcggttagctccttcggtcctccgatcgttgtcagaagtaagttggccgcagtgttatcactcatggttatggcagcactgcataattctcttactgtcatgccatccgtaagatgcttttctgtgactggtgagtactcaaccaagtcattctgagaatagtgtatgcggcgaccgagttgctcttgcccggcgtcaatacgggataataccgcgccacatagcagaactttaaaagtgctcatcattggaaaacgttcttcggggcgaaaactctcaaggatcttaccgctgttgagatccagttcgatgtaacccactcgtgcacccaactgatcttcagcatcttttactttcaccagcgtttctgggtgagcaaaaacaggaaggcaaaatgccgcaaaaaagggaataagggcgacacggaaatgttgaatactcatactcttcctttttcaatattattgaagcatttatcagggttattgtctcatgagcggatacatatttgaatgtatttagaaaaataaacaaataggggttccgcgcacatttccccgaaaagtgccacctgacgtcgacggatcgggagatctcccgatcccctatggtgcactctcagtacaatctgctctgatgccgcatagttaagccagtatctgctccctgcttgtgtgttggaggtcgctgagtagtgcgcgagcaaaatttaagctacaacaaggcaaggcttgaccgacaattgcatgaagaatctgcttagggttaggcgttttgcgctgcttcgcgatgtacgggccagatatacgcgttgacattgattattgactagttattaatagtaatcaattacggggtcattagttcatagcccatatatggagttccgcgttacataacttacggtaaatggcccgcctggctgaccgcccaacgacccccgcccattgacgtcaataatgacgtatgttcccatagtaacgccaatagggactttccattgacgtcaatgggtggagtatttacggtaaactgcccacttggcagtacatcaagtgtatcatatgccaagtacgccccctattgacgtcaatgacggtaaatggcccgcctggcattatgcccagtacatgaccttatgggactttcctacttggcagtacatctacgtattagtcatcgctattaccatggtgatgcggttttggcagtacatcaatgggcgtggatagcggtttgactcacggggatttccaagtctccaccccattgacgtcaatgggagtttgttttggcaccaaaatcaacgggactttccaaaatgtcgtaacaactccgccccattgacgcaaatgggcggtaggcgtgtacggtgggaggtctatataagcagcgcgttttgcct

SEQ ID NO: 18 - DNA, 10080 bp, synthetic construct
  misc_feature 1..10080: note = Synthetic: RMP-004
  source 1..10080: mol_type = other DNA
gtactgggtctctctggttagaccagatctgagcctgggagctctctggctaactagggaacccactgcttaagcctcaataaagcttgccttgagtgcttcaagtagtgtgtgcccgtctgttgtgtgactctggtaactagagatccctcagacccttttagtcagtgtggaaaatctctagcagtggcgcccgaacagggacttgaaagcgaaagggaaaccagaggagctctctcgacgcaggactcggcttgctgaagcgcgcacggcaagaggcgaggggcggcgactggtgagtacgccaaaaattttgactagcggaggctagaaggagagagatgggtgcgagagcgtcagtattaagcgggggagaattagatcgcgatgggaaaaaattcggttaaggccagggggaaagaaaaaatataaattaaaacatatagtatgggcaagcagggagctagaacgattcgcagttaatcctggcctgttagaaacatcagaaggctgtagacaaatactgggacagctacaaccatcccttcagacaggatcagaagaacttagatcattatataatacagtagcaaccctctattgtgtgcatcaaaggatagagataaaagacaccaaggaagctttagacaagatagaggaagagcaaaacaaaagtaagaccaccgcacagcaagcggccgctgatcttcagacctggaggaggagatatgagggacaattggagaagtgaattatataaatataaagtagtaaaaattgaaccattaggagtagcacccaccaaggcaaagagaagagtggtgcagagagaaaaaagagcagtgggaataggagctttgttccttgggttcttgggagcagcaggaagcactatgggcgcagcgtcaatgacgctgacggtacaggccagacaattattgtctggtatagtgcagcagcagaacaatttgctgagggctattgaggcgcaacagcatctgttgcaactcacagtctggggcatcaagcagctccaggcaagaatcctggctgtggaaagatacctaaaggatcaacagctcctggggatttggggttgctctggaaaactcatttgcaccactgctgtgccttggaatgctagttggagtaataaatctctggaacagatttggaatcacacgacctggatggagtgggacagagaaattaacaattacacaagcttaatacactccttaattgaagaatcgcaaaaccagcaagaaaagaatgaacaagaattattggaattagataaatgggcaagtttgtggaattggtttaacataacaaattggctgtggtatataaaattattcataatgatagtaggaggcttggtaggtttaagaatagtttttgctgtactttctatagtgaatagagttaggcagggatattcaccattatcgtttcagacccacctcccaaccccgaggggacccgacaggcccgaaggaatagaagaagaaggtggagagagagacagagacagatccattcgattagtgaacggatcggcactgcgtgcgccaattctgcagacaaatggcagtattcatccacaattttaaaagaaaaggggggattggggggtacagtgcaggggaaagaatagtagacataatagcaacagacatacaaactaaagaattacaaaaacaaattacaaaaattcaaaattttcgggtttattacagggacagcagagatccagtttggttaattaaggatctgcgatcgctccggtgcccgtcagtgggcagagcgcacatcgcccacagtccccgagaagttggggggaggggtcggcaattgaaccggtgcctagagaaggtggcgcggggtaaactgggaaagtgatgtcgtgtactggctccgcctttttcccgagggtgggggagaaccgtatataagtgcagtagtcgccgtgaacgttctttttcgcaacgggtttgccgccagaacacagctgaagcttcgaggggctcgcatctctccttcacgcgcccgccgccctacctgaggccgccatccacgccggttgagtcgcgttctgccgcctcccgcctgtggtgcctcctgaactgcgtccgccgtctaggtaagtttaaagctcaggtcgagaccgggcctttgtccggcgctcccttggagcctacctagactcagccggctctccacgctttgcctgaccctgcttgctcaactctacgtctttgtttcgttttctgttctgcgccgttacagatccaagctgtgaccggcgcctaggatccccgggtaccggtcgtacgttcgaagctagcatgatttcaccattcttagtactggccattggcacctgccttactaactccttagtgccagagaaagagaaagaccccaagtactggcgagaccaagcgcaagagacactgaaatatgccctggagcttcagaagctcaacaccaacgtggctaagaatgtcatcatgttcctgggagatgggatgggtgtctccacagtgacggctgcccgcatcctcaagggtcagctccaccacaaccctggggaggagaccaggctggagatggacaagttccccttcgtggccctctccaagacgtacaacaccaatgcccaggtccctgacagtgccggcaccgccaccgcctacctgtgtggggtgaaggccaatgagggcaccgtgggggtaagcgcagccactgagcgttcccggtgcaacaccacccaggggaacgaggtcacctccatcctgcgctgggccaaggacgctgggaaatctgtgggcattgtgaccaccacgagagtgaaccatgccacccccagcgccgcctacgcccactcggctgaccgggactggtactcagacaacgagatgccccctgaggccttgagccagggctgtaaggacatcgcctaccagctcatgcataacatcagggacattgacgtgatcatggggggtggccggaaatacatgtaccccaagaataaaactgatgtggagtatgagagtgacgagaaagccaggggcacgaggctggacggcctggacctcgttgacacctggaagagcttcaaaccgagatacaagcactcccacttcatctggaaccgcacggaactcctgacccttgacccccacaatgtggactacctattgggtctcttcgagccaggggacatgcagtacgagctgaacaggaacaacgtgacggacccgtcactctccgagatggtggtggtggccatccagatcctgcggaagaaccccaaaggcttcttcttgctggtggaaggaggcagaattgaccacgggcaccatgaaggaaaagccaagcaggccctgcatgaggcggtggagatggaccgggccatcgggcaggcaggcagcttgacctcctcggaagacactctgaccgtggtcactgcggaccattcccacgtcttcacatttggtggatacaccccccgtggcaactctatctttggtctggcccccatgctgagtgacacagacaagaagcccttcactgccatcctgtatggcaatgggcctggctacaaggtggtgggcggtgaacgagagaatgtctccatggtggactatgctcacaacaactaccaggcgcagtctgctgtgcccctgcgccacgagacccacggcggggaggacgtggccgtcttctccaagggccccatggcgcacctgctgcacggcgtccacgagcagaactacgtcccccacgtgatggcgtatgcagcctgcatcggggccaacctcggccactgtgctcctgccagctcgggtggcggaagcgggggaggtagtgatgacgacgacgatgacgacgacgacgattgagaattcgatatcaagcttatcgataatcaacctctggattacaaaatttgtgaaagattgactggtattcttaactatgttgctccttttacgctatgtggatacgctgctttaatgcctttgtatcatgctattgcttcccgtatggctttcattttctcctccttgtataaatcctggttgctgtctctttatgaggagttgtggcccgttgtcaggcaacgtggcgtggtgtgcactgtgtttgctgacgcaacccccactggttggggcattgccaccacctgtcagctcctttccgggactttcgctttccccctccctattgccacggcggaactcatcgccgcctgccttgcccgctgctggacaggggctcggctgttgggcactgacaattccgtggtgttgtcggggaaatcatcgtcctttccttggctgctcgcctgtgttgccacctggattctgcgcgggacgtccttctgctacgtcccttcggccctcaatccagcggaccttccttcccgcggcctgctgccggctctgcggcctcttccgcgtcttcgccttcgccctcagacgagtcggatctccctttgggccgcctccccgcatcgataccgtcgacctcgatcgagacctagaaaaacatggagcaatcacaagtagcaatacagcagctaccaatgctgattgtgcctggctagaagcacaagaggaggaggaggtgggttttccagtcacacctcaggtacctttaagaccaatgacttacaaggcagctgtagatcttagccactttttaaaagaaaaggggggactggaagggctaattcactcccaacgaagacaagatatccttgatctgtggatctaccacacacaaggctacttccctgattggcagaactacacaccagggccagggatcagatatccactgacctttggatggtgctacaagctagtaccagttgagcaagagaaggtagaagaagccaatgaaggagagaacacccgcttgttacaccctgtgagcctgcatgggatggatgacccggagagagaagtattagagtggaggtttgacagccgcctagcatttcatcacatggcccgagagctgcatccggactgtactgggtctctctggttagaccagatctgagcctgggagctctctggctaactagggaacccactgcttaagcctcaataaagcttgccttgagtgcttcaagtagtgtgtgcccgtctgttgtgtgactctggtaactagagatccctcagacccttttagtcagtgtggaaaatctctagcagggcccgtttaaacccgctgatcagcctcgactgtgccttctagttgccagccatctgttgtttgcccctcccccgtgccttccttgaccctggaaggtgccactcccactgtcctttcctaataaaatgaggaaattgcatcgcattgtctgagtaggtgtcattctattctggggggtggggtggggcaggacagcaagggggaggattgggaagacaatagcaggcatgctggggatgcggtgggctctatggcttctgaggcggaaagaaccagctggggctctagggggtatccccacgcgccctgtagcggcgcattaagcgcggcgggtgtggtggttacgcgcagcgtgaccgctacacttgccagcgccctagcgcccgctcctttcgctttcttcccttcctttctcgccacgttcgccggctttccccgtcaagctctaaatcgggggctccctttagggttccgatttagtgctttacggcacctcgaccccaaaaaacttgattagggtgatggttcacgtagtgggccatcgccctgatagacggtttttcgccctttgacgttggagtccacgttctttaatagtggactcttgttccaaactggaacaacactcaaccctatctcggtctattcttttgatttataagggattttgccgatttcggcctattggttaaaaaatgagctgatttaacaaaaatttaacgcgaattaattctgtggaatgtgtgtcagttagggtgtggaaagtccccaggctccccagcaggcagaagtatgcaaagcatgcatctcaattagtcagcaaccaggtgtggaaagtccccaggctccccagcaggcagaagtatgcaaagcatgcatctcaattagtcagcaaccatagtcccgcccctaactccgcccatcccgcccctaactccgcccagttccgcccattctccgccccatggctgactaattttttttatttatgcagaggccgaggccgcctctgcctctgagctattccagaagtagtgaggaggcttttttggaggcctaggcttttgcaaaaagctcccgggagcttgtatatccattttcggatctgatcagcacgtgttgacaattaatcatcggcatagtatatcggcatagtataatacgacaaggtgaggaactaaaccatggccaagttgaccagtgccgttccggtgctcaccgcgcgcgacgtcgccggagcggtcgagttctggaccgaccggctcgggttctcccgggacttcgtggaggacgacttcgccggtgtggtccgggacgacgtgaccctgttcatcagcgcggtccaggaccaggtggtgccggacaacaccctggcctgggtgtgggtgcgcggcctggacgagctgtacgccgagtggtcggaggtcgtgtccacgaacttccgggacgcctccgggccggccatgaccgagatcggcgagcagccgtgggggcgggagttcgccctgcgcgacccggccggcaactgcgtgcacttcgtggccgaggagcaggactgacacgtgctacgagatttcgattccaccgccgccttctatgaaaggttgggcttcggaatcgttttccgggacgccggctggatgatcctccagcgcggggatctcatgctggagttcttcgcccaccccaacttgtttattgcagcttataatggttacaaataaagcaatagcatcacaaatttcacaaataaagcatttttttcactgcattctagttgtggtttgtccaaactcatcaatgtatcttatcatgtctgtataccgtcgacctctagctagagcttggcgtaatcatggtcatagctgtttcctgtgtgaaattgttatccgctcacaattccacacaacatacgagccggaagcataaagtgtaaagcctggggtgcctaatgagtgagctaactcacattaattgcgttgcgctcactgcccgctttccagtcgggaaacctgtcgtgccagctgcattaatgaatcggccaacgcgcggggagaggcggtttgcgtattgggcgctcttccgcttcctcgctcactgactcgctgcgctcggtcgttcggctgcggcgagcggtatcagctcactcaaaggcggtaatacggttatccacagaatcaggggataacgcaggaaagaacatgtgagcaaaaggccagcaaaaggccaggaaccgtaaaaaggccgcgttgctggcgtttttccataggctccgcccccctgacgagcatcacaaaaatcgacgctcaagtcagaggtggcgaaacccgacaggactataaagataccaggcgtttccccctggaagctccctcgtgcgctctcctgttccgaccctgccgcttaccggatacctgtccgcctttctcccttcgggaagcgtggcgctttctcatagctcacgctgtaggtatctcagttcggtgtaggtcgttcgctccaagctgggctgtgtgcacgaaccccccgttcagcccgaccgctgcgccttatccggtaactatcgtcttgagtccaacccggtaagacacgacttatcgccactggcagcagccactggtaacaggattagcagagcgaggtatgtaggcggtgctacagagttcttgaagtggtggcctaactacggctacactagaagaacagtatttggtatctgcgctctgctgaagccagttaccttcggaaaaagagttggtagctcttgatccggcaaacaaaccaccgctggtagcggtggtttttttgtttgcaagcagcagattacgcgcagaaaaaaaggatctcaagaagatcctttgatcttttctacggggtctgacgctcagtggaacgaaaactcacgttaagggattttggtcatgagattatcaaaaaggatcttcacctagatccttttaaattaaaaatgaagttttaaatcaatctaaagtatatatgagtaaacttggtctgacagttaccaatgcttaatcagtgaggcacctatctcagcgatctgtctatttcgttcatccatagttgcctgactccccgtcgtgtagataactacgatacgggagggcttaccatctggccccagtgctgcaatgataccgcgagacccacgctcaccggctccagatttatcagcaataaaccagccagccggaagggccgagcgcagaagtggtcctgcaactttatccgcctccatccagtctattaattgttgccgggaagctagagtaagtagttcgccagttaatagtttgcgcaacgttgttgccattgctacaggcatcgtggtgtcacgctcgtcgtttggtatggcttcattcagctccggttcccaacgatcaaggcgagttacatgatcccccatgttgtgcaaaaaagcggttagctccttcggtcctccgatcgttgtcagaagtaagttggccgcagtgttatcactcatggttatggcagcactgcataattctcttactgtcatgccatccgtaagatgcttttctgtgactggtgagtactcaaccaagtcattctgagaatagtgtatgcggcgaccgagttgctcttgcccggcgtcaatacgggataataccgcgccacatagcagaactttaaaagtgctcatcattggaaaacgttcttcggggcgaaaactctcaaggatcttaccgctgttgagatccagttcgatgtaacccactcgtgcacccaactgatcttcagcatcttttactttcaccagcgtttctgggtgagcaaaaacaggaaggcaaaatgccgcaaaaaagggaataagggcgacacggaaatgttgaatactcatactcttcctttttcaatattattgaagcatttatcagggttattgtctcatgagcggatacatatttgaatgtatttagaaaaataaacaaataggggttccgcgcacatttccccgaaaagtgccacctgacgtcgacggatcgggagatctcccgatcccctatggtgcactctcagtacaatctgctctgatgccgcatagttaagccagtatctgctccctgcttgtgtgttggaggtcgctgagtagtgcgcgagcaaaatttaagctacaacaaggcaaggcttgaccgacaattgcatgaagaatctgcttagggttaggcgttttgcgctgcttcgcgatgtacgggccagatatacgcgttgacattgattattgactagttattaatagtaatcaattacggggtcattagttcatagcccatatatggagttccgcgttacataacttacggtaaatggcccgcctggctgaccgcccaacgacccccgcccattgacgtcaataatgacgtatgttcccatagtaacgccaatagggactttccattgacgtcaatgggtggagtatttacggtaaactgcccacttggcagtacatcaagtgtatcatatgccaagtacgccccctattgacgtcaatgacggtaaatggcccgcctggcattatgcccagtacatgaccttatgggactttcctacttggcagtacatctacgtattagtcatcgctattaccatggtgatgcggttttggcagtacatcaatgggcgtggatagcggtttgactcacggggatttccaagtctccaccccattgacgtcaatgggagtttgttttggcaccaaaatcaacgggactttccaaaatgtcgtaacaactccgccccattgacgcaaatgggcggtaggcgtgtacggtgggaggtctatataagcagcgcgttttgcct

SEQ ID NO: 19 - DNA, 10080 bp, synthetic construct
  misc_feature 1..10080: note = Synthetic: RMP-005, EF1a-RMP5
  source 1..10080: mol_type = other DNA
gtactgggtctctctggttagaccagatctgagcctgggagctctctggctaactagggaacccactgcttaagcctcaataaagcttgccttgagtgcttcaagtagtgtgtgcccgtctgttgtgtgactctggtaactagagatccctcagacccttttagtcagtgtggaaaatctctagcagtggcgcccgaacagggacttgaaagcgaaagggaaaccagaggagctctctcgacgcaggactcggcttgctgaagcgcgcacggcaagaggcgaggggcggcgactggtgagtacgccaaaaattttgactagcggaggctagaaggagagagatgggtgcgagagcgtcagtattaagcgggggagaattagatcgcgatgggaaaaaattcggttaaggccagggggaaagaaaaaatataaattaaaacatatagtatgggcaagcagggagctagaacgattcgcagttaatcctggcctgttagaaacatcagaaggctgtagacaaatactgggacagctacaaccatcccttcagacaggatcagaagaacttagatcattatataatacagtagcaaccctctattgtgtgcatcaaaggatagagataaaagacaccaaggaagctttagacaagatagaggaagagcaaaacaaaagtaagaccaccgcacagcaagcggccgctgatcttcagacctggaggaggagatatgagggacaattggagaagtgaattatataaatataaagtagtaaaaattgaaccattaggagtagcacccaccaaggcaaagagaagagtggtgcagagagaaaaaagagcagtgggaataggagctttgttccttgggttcttgggagcagcaggaagcactatgggcgcagcgtcaatgacgctgacggtacaggccagacaattattgtctggtatagtgcagcagcagaacaatttgctgagggctattgaggcgcaacagcatctgttgcaactcacagtctggggcatcaagcagctccaggcaagaatcctggctgtggaaagatacctaaaggatcaacagctcctggggatttggggttgctctggaaaactcatttgcaccactgctgtgccttggaatgctagttggagtaataaatctctggaacagatttggaatcacacgacctggatggagtgggacagagaaattaacaattacacaagcttaatacactccttaattgaagaatcgcaaaaccagcaagaaaagaatgaacaagaattattggaattagataaatgggcaagtttgtggaattggtttaacataacaaattggctgtggtatataaaattattcataatgatagtaggaggcttggtaggtttaagaatagtttttgctgtactttctatagtgaatagagttaggcagggatattcaccattatcgtttcagacccacctcccaaccccgaggggacccgacaggcccgaaggaatagaagaagaaggtggagagagagacagagacagatccattcgattagtgaacggatcggcactgcgtgcgccaattctgcagacaaatggcagtattcatccacaattttaaaagaaaaggggggattggggggtacagtgcaggggaaagaatagtagacataatagcaacagacatacaaactaaagaattacaaaaacaaattacaaaaattcaaaattttcgggtttattacagggacagcagagatccagtttggttaattaaggatctgcgatcgctccggtgcccgtcagtgggcagagcgcacatcgcccacagtccccgagaagttggggggaggggtcggcaattgaaccggtgcctagagaaggtggcgcggggtaaactgggaaagtgatgtcgtgtactggctccgcctttttcccgagggtgggggagaaccgtatataagtgcagtagtcgccgtgaacgttctttttcgcaacgggtttgccgccagaacacagctgaagcttcgaggggctcgcatctctccttcacgcgcccgccgccctacctgaggccgccatccacgccggttgagtcgcgttctgccgcctcccgcctgtggtgcctcctgaactgcgtccgccgtctaggtaagtttaaagctcaggtcgagaccgggcctttgtccggcgctcccttggagcctacctagactcagccggctctccacgctttgcctgaccctgcttgctcaactctacgtctttgtttcgttttctgttctgcgccgttacagatccaagctgtgaccggcgcctaggatccccgggtaccggtcgtacgttcgaagctagcatgatttcacccttcctggttttggcaattggaacctgccttaccaactcccttgtccctgaaaaggagaaggaccccaaatattggagagaccaggctcaggaaaccctcaagtacgctcttgaactgcaaaagcttaatactaacgtggctaaaaacgtgataatgttcttgggggacggaatgggggtttcaaccgttaccgcggccagaatcttgaaagggcagctgcaccataacccaggcgaagaaacgaggctggagatggacaaatttccattcgtggcgctttctaagacctacaacactaacgcccaggtccctgactcagctggtacggccactgcctacctttgtggagtgaaggcaaatgaggggactgttggtgtttccgcagctactgagagatctcggtgtaatacgactcaaggtaatgaagttacatccatactccgatgggcaaaagacgcgggcaaatctgttgggattgttacaactactagggtgaaccatgcgacaccctctgcagcttatgcgcacagtgccgaccgagactggtattcagataatgagatgccacccgaggcccttagccagggctgcaaggacatagcctatcaattgatgcacaatatcagagacatagacgttataatgggtggtggtcgcaagtacatgtaccccaaaaacaaaaccgacgtagagtatgaatccgatgaaaaagctaggggcaccagactcgacggacttgatctggttgatacatggaaatcctttaaacctcggtataagcattcacatttcatctggaacaggaccgaacttctcacattggacccccacaatgttgactatctcctcggtttgtttgaaccaggggatatgcagtatgagctcaatcggaacaacgtcactgaccccagtttgagtgaaatggtcgttgttgcaatacaaattttgaggaaaaatccaaaggggtttttcttgttggtagagggcggacggatagatcacgggcaccacgaaggcaaagcaaaacaggccctgcacgaagccgttgaaatggatcgcgctatcggtcaagccggctccctgacgagtagtgaagataccttgaccgtcgtcactgcggatcatagccacgtttttacctttgggggatacacccccaggggcaactcaatttttggacttgcaccgatgctcagcgacacagataaaaagccttttactgcgattctgtatggcaacggccctggatacaaagtagtagggggtgaaagggaaaacgtcagcatggtggactatgcacacaataattatcaggcgcagtccgctgttccgctgcggcatgagactcacgggggagaggacgttgctgtcttttccaagggaccaatggctcatcttctccatggagtccatgagcaaaattatgtccctcatgtcatggcatacgctgcatgtataggagcaaatctcgggcactgtgcaccggcgtcctccgattccagcgacagttcagacagctctgacagctccgattcctccgactcaagttgagaattcgatatcaagcttatcgataatcaacctctggattacaaaatttgtgaaagattgactggtattcttaactatgttgctccttttacgctatgtggatacgctgctttaatgcctttgtatcatgctattgcttcccgtatggctttcattttctcctccttgtataaatcctggttgctgtctctttatgaggagttgtggcccgttgtcaggcaacgtggcgtggtgtgcactgtgtttgctgacgcaacccccactggttggggcattgccaccacctgtcagctcctttccgggactttcgctttccccctccctattgccacggcggaactcatcgccgcctgccttgcccgctgctggacaggggctcggctgttgggcactgacaattccgtggtgttgtcggggaaatcatcgtcctttccttggctgctcgcctgtgttgccacctggattctgcgcgggacgtccttctgctacgtcccttcggccctcaatccagcggaccttccttcccgcggcctgctgccggctctgcggcctcttccgcgtcttcgccttcgccctcagacgagtcggatctccctttgggccgcctccccgcatcgataccgtcgacctcgatcgagacctagaaaaacatggagcaatcacaagtagcaatacagcagctaccaatgctgattgtgcctggctagaagcacaagaggaggaggaggtgggttttccagtcacacctcaggtacctttaagaccaatgacttacaaggcagctgtagatcttagccactttttaaaagaaaaggggggactggaagggctaattcactcccaacgaagacaagatatccttgatctgtggatctaccacacacaaggctacttccctgattggcagaactacacaccagggccagggatcagatatccactgacctttggatggtgctacaagctagtaccagttgagcaagagaaggtagaagaagccaatgaaggagagaacacccgcttgttacaccctgtgagcctgcatgggatggatgacccggagagagaagtattagagtggaggtttgacagccgcctagcatttcatcacatggcccgagagctgcatccggactgtactgggtctctctggttagaccagatctgagcctgggagctctctggctaactagggaacccactgcttaagcctcaataaagcttgccttgagtgcttcaagtagtgtgtgcccgtctgttgtgtgactctggtaactagagatccctcagacccttttagtcagtgtggaaaatctctagcagggcccgtttaaacccgctgatcagcctcgactgtgccttctagttgccagccatctgttgtttgcccctcccccgtgccttccttgaccctggaaggtgccactcccactgtcctttcctaataaaatgaggaaattgcatcgcattgtctgagtaggtgtcattctattctggggggtggggtggggcaggacagcaagggggaggattgggaagacaatagcaggcatgctggggatgcggtgggctctatggcttctgaggcggaaagaaccagctggggctctagggggtatccccacgcgccctgtagcggcgcattaagcgcggcgggtgtggtggttacgcgcagcgtgaccgctacacttgccagcgccctagcgcccgctcctttcgctttcttcccttcctttctcgccacgttcgccggctttccccgtcaagctctaaatcgggggctccctttagggttccgatttagtgctttacggcacctcgaccccaaaaaacttgattagggtgatggttcacgtagtgggccatcgccctgatagacggtttttcgccctttgacgttggagtccacgttctttaatagtggactcttgttccaaactggaacaacactcaaccctatctcggtctattcttttgatttataagggattttgccgatttcggcctattggttaaaaaatgagctgatttaacaaaaatttaacgcgaattaattctgtggaatgtgtgtcagttagggtgtggaaagtccccaggctccccagcaggcagaagtatgcaaagcatgcatctcaattagtcagcaaccaggtgtggaaagtccccaggctccccagcaggcagaagtatgcaaagcatgcatctcaattagtcagcaaccatagtcccgcccctaactccgcccatcccgcccctaactccgcccagttccgcccattctccgccccatggctgactaattttttttatttatgcagaggccgaggccgcctctgcctctgagctattccagaagtagtgaggaggcttttttggaggcctaggcttttgcaaaaagctcccgggagcttgtatatccattttcggatctgatcagcacgtgttgacaattaatcatcggcatagtatatcggcatagtataatacgacaaggtgaggaactaaaccatggccaagttgaccagtgccgttccggtgctcaccgcgcgcgacgtcgccggagcggtcgagttctggaccgaccggctcgggttctcccgggacttcgtggaggacgacttcgccggtgtggtccgggacgacgtgaccctgttcatcagcgcggtccaggaccaggtggtgccggacaacaccctggcctgggtgtgggtgcgcggcctggacgagctgtacgccgagtggtcggaggtcgtgtccacgaacttccgggacgcctccgggccggccatgaccgagatcggcgagcagccgtgggggcgggagttcgccctgcgcgacccggccggcaactgcgtgcacttcgtggccgaggagcaggactgacacgtgctacgagatttcgattccaccgccgccttctatgaaaggttgggcttcggaatcgttttccgggacgccggctggatgatcctccagcgcggggatctcatgctggagttcttcgcccaccccaacttgtttattgcagcttataatggttacaaataaagcaatagcatcacaaatttcacaaataaagcatttttttcactgcattctagttgtggtttgtccaaactcatcaatgtatcttatcatgtctgtataccgtcgacctctagctagagcttggcgtaatcatggtcatagctgtttcctgtgtgaaattgttatccgctcacaattccacacaacatacgagccggaagcataaagtgtaaagcctggggtgcctaatgagtgagctaactcacattaattgcgttgcgctcactgcccgctttccagtcgggaaacctgtcgtgccagctgcattaatgaatcggccaacgcgcggggagaggcggtttgcgtattgggcgctcttccgcttcctcgctcactgactcgctgcgctcggtcgttcggctgcggcgagcggtatcagctcactcaaaggcggtaatacggttatccacagaatcaggggataacgcaggaaagaacatgtgagcaaaaggccagcaaaaggccaggaaccgtaaaaaggccgcgttgctggcgtttttccataggctccgcccccctgacgagcatcacaaaaatcgacgctcaagtcagaggtggcgaaacccgacaggactataaagataccaggcgtttccccctggaagctccctcgtgcgctctcctgttccgaccctgccgcttaccggatacctgtccgcctttctcccttcgggaagcgtggcgctttctcatagctcacgctgtaggtatctcagttcggtgtaggtcgttcgctccaagctgggctgtgtgcacgaaccccccgttcagcccgaccgctgcgccttatccggtaactatcgtcttgagtccaacccggtaagacacgacttatcgccactggcagcagccactggtaacaggattagcagagcgaggtatgtaggcggtgctacagagttcttgaagtggtggcctaactacggctacactagaagaacagtatttggtatctgcgctctgctgaagccagttaccttcggaaaaagagttggtagctcttgatccggcaaacaaaccaccgctggtagcggtggtttttttgtttgcaagcagcagattacgcgcagaaaaaaaggatctcaagaagatcctttgatcttttctacggggtctgacgctcagtggaacgaaaactcacgttaagggattttggtcatgagattatcaaaaaggatcttcacctagatccttttaaattaaaaatgaagttttaaatcaatctaaagtatatatgagtaaacttggtctgacagttaccaatgcttaatcagtgaggcacctatctcagcgatctgtctatttcgttcatccatagttgcctgactccccgtcgtgtagataactacgatacgggagggcttaccatctggccccagtgctgcaatgataccgcgagacccacgctcaccggctccagatttatcagcaataaaccagccagccggaagggccgagcgcagaagtggtcctgcaactttatccgcctccatccagtctattaattgttgccgggaagctagagtaagtagttcgccagttaatagtttgcgcaacgttgttgccattgctacaggcatcgtggtgtcacgctcgtcgtttggtatggcttcattcagctccggttcccaacgatcaaggcgagttacatgatcccccatgttgtgcaaaaaagcggttagctccttcggtcctccgatcgttgtcagaagtaagttggccgcagtgttatcactcatggttatggcagcactgcataattctcttactgtcatgccatccgtaagatgcttttctgtgactggtgagtactcaaccaagtcattctgagaatagtgtatgcggcgaccgagttgctcttgcccggcgtcaatacgggataataccgcgccacatagcagaactttaaaagtgctcatcattggaaaacgttcttcggggcgaaaactctcaaggatcttaccgctgttgagatccagttcgatgtaacccactcgtgcacccaactgatcttcagcatcttttactttcaccagcgtttctgggtgagcaaaaacaggaaggcaaaatgccgcaaaaaagggaataagggcgacacggaaatgttgaatactcatactcttcctttttcaatattattgaagcatttatcagggttattgtctcatgagcggatacatatttgaatgtatttagaaaaataaacaaataggggttccgcgcacatttccccgaaaagtgccacctgacgtcgacggatcgggagatctcccgatcccctatggtgcactctcagtacaatctgctctgatgccgcatagttaagccagtatctgctccctgcttgtgtgttggaggtcgctgagtagtgcgcgagcaaaatttaagctacaacaaggcaaggcttgaccgacaattgcatgaagaatctgcttagggttaggcgttttgcgctgcttcgcgatgtacgggccagatatacgcgttgacattgattattgactagttattaatagtaatcaattacggggtcattagttcatagcccatatatggagttccgcgttacataacttacggtaaatggcccgcctggctgaccgcccaacgacccccgcccattgacgtcaataatgacgtatgttcccatagtaacgccaatagggactttccattgacgtcaatgggtggagtatttacggtaaactgcccacttggcagtacatcaagtgtatcatatgccaagtacgccccctattgacgtcaatgacggtaaatggcccgcctggcattatgcccagtacatgaccttatgggactttcctacttggcagtacatctacgtattagtcatcgctattaccatggtgatgcggttttggcagtacatcaatgggcgtggatagcggtttgactcacggggatttccaagtctccaccccattgacgtcaatgggagtttgttttggcaccaaaatcaacgggactttccaaaatgtcgtaacaactccgccccattgacgcaaatgggcggtaggcgtgtacggtgggaggtctatataagcagcgcgttttgcct

SEQ ID NO: 20 - DNA, 10116 bp, synthetic construct
  misc_feature 1..10116: note = Synthetic: RMP-006
  source 1..10116: mol_type = other DNA
gtactgggtctctctggttagaccagatctgagcctgggagctctctggctaactagggaacccactgcttaagcctcaataaagcttgccttgagtgcttcaagtagtgtgtgcccgtctgttgtgtgactctggtaactagagatccctcagacccttttagtcagtgtggaaaatctctagcagtggcgcccgaacagggacttgaaagcgaaagggaaaccagaggagctctctcgacgcaggactcggcttgctgaagcgcgcacggcaagaggcgaggggcggcgactggtgagtacgccaaaaattttgactagcggaggctagaaggagagagatgggtgcgagagcgtcagtattaagcgggggagaattagatcgcgatgggaaaaaattcggttaaggccagggggaaagaaaaaatataaattaaaacatatagtatgggcaagcagggagctagaacgattcgcagttaatcctggcctgttagaaacatcagaaggctgtagacaaatactgggacagctacaaccatcccttcagacaggatcagaagaacttagatcattatataatacagtagcaaccctctattgtgtgcatcaaaggatagagataaaagacaccaaggaagctttagacaagatagaggaagagcaaaacaaaagtaagaccaccgcacagcaagcggccgctgatcttcagacctggaggaggagatatgagggacaattggagaagtgaattatataaatataaagtagtaaaaattgaaccattaggagtagcacccaccaaggcaaagagaagagtggtgcagagagaaaaaagagcagtgggaataggagctttgttccttgggttcttgggagcagcaggaagcactatgggcgcagcgtcaatgacgctgacggtacaggccagacaattattgtctggtatagtgcagcagcagaacaatttgctgagggctattgaggcgcaacagcatctgttgcaactcacagtctggggcatcaagcagctccaggcaagaatcctggctgtggaaagatacctaaaggatcaacagctcctggggatttggggttgctctggaaaactcatttgcaccactgctgtgccttggaatgctagttggagtaataaatctctggaacagatttggaatcacacgacctggatggagtgggacagagaaattaacaattacacaagcttaatacactccttaattgaagaatcgcaaaaccagcaagaaaagaatgaacaagaattattggaattagataaatgggcaagtttgtggaattggtttaacataacaaattggctgtggtatataaaattattcataatgatagtaggaggcttggtaggtttaagaatagtttttgctgtactttctatagtgaatagagttaggcagggatattcaccattatcgtttcagacccacctcccaaccccgaggggacccgacaggcccgaaggaatagaagaagaaggtggagagagagacagagacagatccattcgattagtgaacggatcggcactgcgtgcgccaattctgcagacaaatggcagtattcatccacaattttaaaagaaaaggggggattggggggtacagtgcaggggaaagaatagtagacataatagcaacagacatacaaactaaagaattacaaaaacaaattacaaaaattcaaaattttcgggtttattacagggacagcagagatccagtttggttaattaaggatctgcgatcgctccggtgcccgtcagtgggcagagcgcacatcgcccacagtccccgagaagttggggggaggggtcggcaattgaaccggtgcctagagaaggtggcgcggggtaaactgggaaagtgatgtcgtgtactggctccgcctttttcccgagggtgggggagaaccgtatataagtgcagtagtcgccgtgaacgttctttttcgcaacgggtttgccgccagaacacagctgaagcttcgaggggctcgcatctctccttcacgcgcccgccgccctacctgaggccgccatccacgccggttgagtcgcgttctgccgcctcccgcctgtggtgcctcctgaactgcgtccgccgtctaggtaagtttaaagctcaggtcgagaccgggcctttgtccggcgctcccttggagcctacctagactcagccggctctccacgctttgcctgaccctgcttgctcaactctacgtctttgtttcgttttctgttctgcgccgttacagatccaagctgtgaccggcgcctaggatccccgggtaccggtaccggtcgtacgttcgaagctagcatgatttcacccttcctggttttggcaattggaacctgccttaccaactcccttgtccctgaaaaggagaaggaccccaaatattggagagaccaggctcaggaaaccctcaagtacgctcttgaactgcaaaagcttaatactaacgtggctaaaaacgtgataatgttcttgggggacggaatgggggtttcaaccgttaccgcggccagaatcttgaaagggcagctgcaccataacccaggcgaagaaacgaggctggagatggacaaatttccattcgtggcgctttctaagacctacaacactaacgcccaggtccctgactcagctggtacggccactgcctacctttgtggagtgaaggcaaatgaggggactgttggtgtttccgcagctactgagagatctcggtgtaatacgactcaaggtaatgaagttacatccatactccgatgggcaaaagacgcgggcaaatctgttgggattgttacaactactagggtgaaccatgcgacaccctctgcagcttatgcgcacagtgccgaccgagactggtattcagataatgagatgccacccgaggcccttagccagggctgcaaggacatagcctatcaattgatgcacaatatcagagacatagacgttataatgggtggtggtcgcaagtacatgtaccccaaaaacaaaaccgacgtagagtatgaatccgatgaaaaagctaggggcaccagactcgacggacttgatctggttgatacatggaaatcctttaaacctcggtataagcattcacatttcatctggaacaggaccgaacttctcacattggacccccacaatgttgactatctcctcggtttgtttgaaccaggggatatgcagtatgagctcaatcggaacaacgtcactgaccccagtttgagtgaaatggtcgttgttgcaatacaaattttgaggaaaaatccaaaggggtttttcttgttggtagagggcggacggatagatcacgggcaccacgaaggcaaagcaaaacaggccctgcacgaagccgttgaaatggatcgcgctatcggtcaagccggctccctgacgagtagtgaagataccttgaccgtcgtcactgcggatcatagccacgtttttacctttgggggatacacccccaggggcaactcaatttttggacttgcaccgatgctcagcgacacagataaaaagccttttactgcgattctgtatggcaacggccctggatacaaagtagtagggggtgaaagggaaaacgtcagcatggtggactatgcacacaataattatcaggcgcagtccgctgttccgctgcggcatgagactcacgggggagaggacgttgctgtcttttccaagggaccaatggctcatcttctccatggagtccatgagcaaaattatgtccctcatgtcatggcatacgctgcatgtataggagcaaatctcgggcactgtgcaccggcgtcctccggagggggcggctcagggggtggaggctcagatagcagcgatagttctgactcatcagattctagtgactcctccgattcctcctgagaattcgatatcaagcttatcgataatcaacctctggattacaaaatttgtgaaagattgactggtattcttaactatgttgctccttttacgctatgtggatacgctgctttaatgcctttgtatcatgctattgcttcccgtatggctttcattttctcctccttgtataaatcctggttgctgtctctttatgaggagttgtggcccgttgtcaggcaacgtggcgtggtgtgcactgtgtttgctgacgcaacccccactggttggggcattgccaccacctgtcagctcctttccgggactttcgctttccccctccctattgccacggcggaactcatcgccgcctgccttgcccgctgctggacaggggctcggctgttgggcactgacaattccgtggtgttgtcggggaaatcatcgtcctttccttggctgctcgcctgtgttgccacctggattctgcgcgggacgtccttctgctacgtcccttcggccctcaatccagcggaccttccttcccgcggcctgctgccggctctgcggcctcttccgcgtcttcgccttcgccctcagacgagtcggatctccctttgggccgcctccccgcatcgataccgtcgacctcgatcgagacctagaaaaacatggagcaatcacaagtagcaatacagcagctaccaatgctgattgtgcctggctagaagcacaagaggaggaggaggtgggttttccagtcacacctcaggtacctttaagaccaatgacttacaaggcagctgtagatcttagccactttttaaaagaaaaggggggactggaagggctaattcactcccaacgaagacaagatatccttgatctgtggatctaccacacacaaggctacttccctgattggcagaactacacaccagggccagggatcagatatccactgacctttggatggtgctacaagctagtaccagttgagcaagagaaggtagaagaagccaatgaaggagagaacacccgcttgttacaccctgtgagcctgcatgggatggatgacccggagagagaagtattagagtggaggtttgacagccgcctagcatttcatcacatggcccgagagctgcatccggactgtactgggtctctctggttagaccagatctgagcctgggagctctctggctaactagggaacccactgcttaagcctcaataaagcttgccttgagtgcttcaagtagtgtgtgcccgtctgttgtgtgactctggtaactagagatccctcagacccttttagtcagtgtggaaaatctctagcagggcccgtttaaacccgctgatcagcctcgactgtgccttctagttgccagccatctgttgtttgcccctcccccgtgccttccttgaccctggaaggtgccactcccactgtcctttcctaataaaatgaggaaattgcatcgcattgtctgagtaggtgtcattctattctggggggtggggtggggcaggacagcaagggggaggattgggaagacaatagcaggcatgctggggatgcggtgggctctatggcttctgaggcggaaagaaccagctggggctctagggggtatccccacgcgccctgtagcggcgcattaagcgcggcgggtgtggtggttacgcgcagcgtgaccgctacacttgccagcgccctagcgcccgctcctttcgctttcttcccttcctttctcgccacgttcgccggctttccccgtcaagctctaaatcgggggctccctttagggttccgatttagtgctttacggcacctcgaccccaaaaaacttgattagggtgatggttcacgtagtgggccatcgccctgatagacggtttttcgccctttgacgttggagtccacgttctttaatagtggactcttgttccaaactggaacaacactcaaccctatctcggtctattcttttgatttataagggattttgccgatttcggcctattggttaaaaaatgagctgatttaacaaaaatttaacgcgaattaattctgtggaatgtgtgtcagttagggtgtggaaagtccccaggctccccagcaggcagaagtatgcaaagcatgcatctcaattagtcagcaaccaggtgtggaaagtccccaggctccccagcaggcagaagtatgcaaagcatgcatctcaattagtcagcaaccatagtcccgcccctaactccgcccatcccgcccctaactccgcccagttccgcccattctccgccccatggctgactaattttttttatttatgcagaggccgaggccgcctctgcctctgagctattccagaagtagtgaggaggcttttttggaggcctaggcttttgcaaaaagctcccgggagcttgtatatccattttcggatctgatcagcacgtgttgacaattaatcatcggcatagtatatcggcatagtataatacgacaaggtgaggaactaaaccatggccaagttgaccagtgccgttccggtgctcaccgcgcgcgacgtcgccggagcggtcgagttctggaccgaccggctcgggttctcccgggacttcgtggaggacgacttcgccggtgtggtccgggacgacgtgaccctgttcatcagcgcggtccaggaccaggtggtgccggacaacaccctggcctgggtgtgggtgcgcggcctggacgagctgtacgccgagtggtcggaggtcgtgtccacgaacttccgggacgcctccgggccggccatgaccgagatcggcgagcagccgtgggggcgggagttcgccctgcgcgacccggccggcaactgcgtgcacttcgtggccgaggagcaggactgacacgtgctacgagatttcgattccaccgccgccttctatgaaaggttgggcttcggaatcgttttccgggacgccggctggatgatcctccagcgcggggatctcatgctggagttcttcgcccaccccaacttgtttattgcagcttataatggttacaaataaagcaatagcatcacaaatttcacaaataaagcatttttttcactgcattctagttgtggtttgtccaaactcatcaatgtatcttatcatgtctgtataccgtcgacctctagctagagcttggcgtaatcatggtcatagctgtttcctgtgtgaaattgttatccgctcacaattccacacaacatacgagccggaagcataaagtgtaaagcctggggtgcctaatgagtgagctaactcacattaattgcgttgcgctcactgcccgctttccagtcgggaaacctgtcgtgccagctgcattaatgaatcggccaacgcgcggggagaggcggtttgcgtattgggcgctcttccgcttcctcgctcactgactcgctgcgctcggtcgttcggctgcggcgagcggtatcagctcactcaaaggcggtaatacggttatccacagaatcaggggataacgcaggaaagaacatgtgagcaaaaggccagcaaaaggccaggaaccgtaaaaaggccgcgttgctggcgtttttccataggctccgcccccctgacgagcatcacaaaaatcgacgctcaagtcagaggtggcgaaacccgacaggactataaagataccaggcgtttccccctggaagctccctcgtgcgctctcctgttccgaccctgccgcttaccggatacctgtccgcctttctcccttcgggaagcgtggcgctttctcatagctcacgctgtaggtatctcagttcggtgtaggtcgttcgctccaagctgggctgtgtgcacgaaccccccgttcagcccgaccgctgcgccttatccggtaactatcgtcttgagtccaacccggtaagacacgacttatcgccactggcagcagccactggtaacaggattagcagagcgaggtatgtaggcggtgctacagagttcttgaagtggtggcctaactacggctacactagaagaacagtatttggtatctgcgctctgctgaagccagttaccttcggaaaaagagttggtagctcttgatccggcaaacaaaccaccgctggtagcggtggtttttttgtttgcaagcagcagattacgcgcagaaaaaaaggatctcaagaagatcctttgatcttttctacggggtctgacgctcagtggaacgaaaactcacgttaagggattttggtcatgagattatcaaaaaggatcttcacctagatccttttaaattaaaaatgaagttttaaatcaatctaaagtatatatgagtaaacttggtctgacagttaccaatgcttaatcagtgaggcacctatctcagcgatctgtctatttcgttcatccatagttgcctgactccccgtcgtgtagataactacgatacgggagggcttaccatctggccccagtgctgcaatgataccgcgagacccacgctcaccggctccagatttatcagcaataaaccagccagccggaagggccgagcgcagaagtggtcctgcaactttatccgcctccatccagtctattaattgttgccgggaagctagagtaagtagttcgccagttaatagtttgcgcaacgttgttgccattgctacaggcatcgtggtgtcacgctcgtcgtttggtatggcttcattcagctccggttcccaacgatcaaggcgagttacatgatcccccatgttgtgcaaaaaagcggttagctccttcggtcctccgatcgttgtcagaagtaagttggccgcagtgttatcactcatggttatggcagcactgcataattctcttactgtcatgccatccgtaagatgcttttctgtgactggtgagtactcaaccaagtcattctgagaatagtgtatgcggcgaccgagttgctcttgcccggcgtcaatacgggataataccgcgccacatagcagaactttaaaagtgctcatcattggaaaacgttcttcggggcgaaaactctcaaggatcttaccgctgttgagatccagttcgatgtaacccactcgtgcacccaactgatcttcagcatcttttactttcaccagcgtttctgggtgagcaaaaacaggaaggcaaaatgccgcaaaaaagggaataagggcgacacggaaatgttgaatactcatactcttcctttttcaatattattgaagcatttatcagggttattgtctcatgagcggatacatatttgaatgtatttagaaaaataaacaaataggggttccgcgcacatttccccgaaaagtgccacctgacgtcgacggatcgggagatctcccgatcccctatggtgcactctcagtacaatctgctctgatgccgcatagttaagccagtatctgctccctgcttgtgtgttggaggtcgctgagtagtgcgcgagcaaaatttaagctacaacaaggcaaggcttgaccgacaattgcatgaagaatctgcttagggttaggcgttttgcgctgcttcgcgatgtacgggccagatatacgcgttgacattgattattgactagttattaatagtaatcaattacggggtcattagttcatagcccatatatggagttccgcgttacataacttacggtaaatggcccgcctggctgaccgcccaacgacccccgcccattgacgtcaataatgacgtatgttcccatagtaacgccaatagggactttccattgacgtcaatgggtggagtatttacggtaaactgcccacttggcagtacatcaagtgtatcatatgccaagtacgccccctattgacgtcaatgacggtaaatggcccgcctggcattatgcccagtacatgaccttatgggactttcctacttggcagtacatctacgtattagtcatcgctattaccatggtgatgcggttttggcagtacatcaatgggcgtggatagcggtttgactcacggggatttccaagtctccaccccattgacgtcaatgggagtttgttttggcaccaaaatcaacgggactttccaaaatgtcgtaacaactccgccccattgacgcaaatgggcggtaggcgtgtacggtgggaggtctatataagcagcgcgttttgcct

SEQ ID NO: 21 - DNA, 10077 bp, synthetic construct
  misc_feature 1..10077: note = Synthetic: RMP-007
  source 1..10077: mol_type = other DNA
gtactgggtctctctggttagaccagatctgagcctgggagctctctggctaactagggaacccactgcttaagcctcaataaagcttgccttgagtgcttcaagtagtgtgtgcccgtctgttgtgtgactctggtaactagagatccctcagacccttttagtcagtgtggaaaatctctagcagtggcgcccgaacagggacttgaaagcgaaagggaaaccagaggagctctctcgacgcaggactcggcttgctgaagcgcgcacggcaagaggcgaggggcggcgactggtgagtacgccaaaaattttgactagcggaggctagaaggagagagatgggtgcgagagcgtcagtattaagcgggggagaattagatcgcgatgggaaaaaattcggttaaggccagggggaaagaaaaaatataaattaaaacatatagtatgggcaagcagggagctagaacgattcgcagttaatcctggcctgttagaaacatcagaaggctgtagacaaatactgggacagctacaaccatcccttcagacaggatcagaagaacttagatcattatataatacagtagcaaccctctattgtgtgcatcaaaggatagagataaaagacaccaaggaagctttagacaagatagaggaagagcaaaacaaaagtaagaccaccgcacagcaagcggccgctgatcttcagacctggaggaggagatatgagggacaattggagaagtgaattatataaatataaagtagtaaaaattgaaccattaggagtagcacccaccaaggcaaagagaagagtggtgcagagagaaaaaagagcagtgggaataggagctttgttccttgggttcttgggagcagcaggaagcactatgggcgcagcgtcaatgacgctgacggtacaggccagacaattattgtctggtatagtgcagcagcagaacaatttgctgagggctattgaggcgcaacagcatctgttgcaactcacagtctggggcatcaagcagctccaggcaagaatcctggctgtggaaagatacctaaaggatcaacagctcctggggatttggggttgctctggaaaactcatttgcaccactgctgtgccttggaatgctagttggagtaataaatctctggaacagatttggaatcacacgacctggatggagtgggacagagaaattaacaattacacaagcttaatacactccttaattgaagaatcgcaaaaccagcaagaaaagaatgaacaagaattattggaattagataaatgggcaagtttgtggaattggtttaacataacaaattggctgtggtatataaaattattcataatgatagtaggaggcttggtaggtttaagaatagtttttgctgtactttctatagtgaatagagttaggcagggatattcaccattatcgtttcagacccacctcccaaccccgaggggacccgacaggcccgaaggaatagaagaagaaggtggagagagagacagagacagatccattcgattagtgaacggatcggcactgcgtgcgccaattctgcagacaaatggcagtattcatccacaattttaaaagaaaaggggggattggggggtacagtgcaggggaaagaatagtagacataatagcaacagacatacaaactaaagaattacaaaaacaaattacaaaaattcaaaattttcgggtttattacagggacagcagagatccagtttggttaattaaggatctgcgatcgctccggtgcccgtcagtgggcagagcgcacatcgcccacagtccccgagaagttggggggaggggtcggcaattgaaccggtgcctagagaaggtggcgcggggtaaactgggaaagtgatgtcgtgtactggctccgcctttttcccgagggtgggggagaaccgtatataagtgcagtagtcgccgtgaacgttctttttcgcaacgggtttgccgccagaacacagctgaagcttcgaggggctcgcatctctccttcacgcgcccgccgccctacctgaggccgccatccacgccggttgagtcgcgttctgccgcctcccgcctgtggtgcctcctgaactgcgtccgccgtctaggtaagtttaaagctcaggtcgagaccgggcctttgtccggcgctcccttggagcctacctagactcagccggctctccacgctttgcctgaccctgcttgctcaactctacgtctttgtttcgttttctgttctgcgccgttacagatccaagctgtgaccggcgcctaggatccccgggtaccggtcgtacgttcgaagctagcatgatttcaccattcttagtactggccattggcacctgccttactaactccttagtgccagagaaagagaaagaccccaagtactggcgagaccaagcgcaagagacactgaaatatgccctggagcttcagaagctcaacaccaacgtggctaagaatgtcatcatgttcctgggagatgggatgggtgtctccacagtgacggctgcccgcatcctcaagggtcagctccaccacaaccctggggaggagaccaggctggagatggacaagttccccttcgtggccctctccaagacgtacaacaccaatgcccaggtccctgacagtgccggcaccgccaccgcctacctgtgtggggtgaaggccaatgagggcaccgtgggggtaagcgcagccactgagcgttcccggtgcaacaccacccaggggaacgaggtcacctccatcctgcgctgggccaaggacgctgggaaatctgtgggcattgtgaccaccacgagagtgaaccatgccacccccagcgccgcctacgcccactcggctgaccgggactggtactcagacaacgagatgccccctgaggccttgagccagggctgtaaggacatcgcctaccagctcatgcataacatcagggacattgacgtgatcatggggggtggccggaaatacatgtaccccaagaataaaactgatgtggagtatgagagtgacgagaaagccaggggcacgaggctggacggcctggacctcgttgacacctggaagagcttcaaaccgagatacaagcactcccacttcatctggaaccgcacggaactcctgacccttgacccccacaatgtggactacctattgggtctcttcgagccaggggacatgcagtacgagctgaacaggaacaacgtgacggacccgtcactctccgagatggtggtggtggccatccagatcctgcggaagaaccccaaaggcttcttcttgctggtggaaggaggcagaattgaccacgggcaccatgaaggaaaagccaagcaggccctgcatgaggcggtggagatggaccgggccatcgggcaggcaggcagcttgacctcctcggaagacactctgaccgtggtcactgcggaccattcccacgtcttcacatttggtggatacaccccccgtggcaactctatctttggtctggcccccatgctgagtgacacagacaagaagcccttcactgccatcctgtatggcaatgggcctggctacaaggtggtgggcggtgaacgagagaatgtctccatggtggactatgctcacaacaactaccaggcgcagtctgctgtgcccctgcgccacgagacccacggcggggaggacgtggccgtcttctccaagggccccatggcgcacctgctgcacggcgtccacgagcagaactacgtcccccacgtgatggcgtatgcagcctgcatcggggccaacctcggccactgtgctcctgccagctcggacccggctgcgactgccgcagacgacgacgacgacgacgacgacgacgattgagaattcgatatcaagcttatcgataatcaacctctggattacaaaatttgtgaaagattgactggtattcttaactatgttgctccttttacgctatgtggatacgctgctttaatgcctttgtatcatgctattgcttcccgtatggctttcattttctcctccttgtataaatcctggttgctgtctctttatgaggagttgtggcccgttgtcaggcaacgtggcgtggtgtgcactgtgtttgctgacgcaacccccactggttggggcattgccaccacctgtcagctcctttccgggactttcgctttccccctccctattgccacggcggaactcatcgccgcctgccttgcccgctgctggacaggggctcggctgttgggcactgacaattccgtggtgttgtcggggaaatcatcgtcctttccttggctgctcgcctgtgttgccacctggattctgcgcgggacgtccttctgctacgtcccttcggccctcaatccagcggaccttccttcccgcggcctgctgccggctctgcggcctcttccgcgtcttcgccttcgccctcagacgagtcggatctccctttgggccgcctccccgcatcgataccgtcgacctcgatcgagacctagaaaaacatggagcaatcacaagtagcaatacagcagctaccaatgctgattgtgcctggctagaagcacaagaggaggaggaggtgggttttccagtcacacctcaggtacctttaagaccaatgacttacaaggcagctgtagatcttagccactttttaaaagaaaaggggggactggaagggctaattcactcccaacgaagacaagatatccttgatctgtggatctaccacacacaaggctacttccctgattggcagaactacacaccagggccagggatcagatatccactgacctttggatggtgctacaagctagtaccagttgagcaagagaaggtagaagaagccaatgaaggagagaacacccgcttgttacaccctgtgagcctgcatgggatggatgacccggagagagaagtattagagtggaggtttgacagccgcctagcatttcatcacatggcccgagagctgcatccggactgtactgggtctctctggttagaccagatctgagcctgggagctctctggctaactagggaacccactgcttaagcctcaataaagcttgccttgagtgcttcaagtagtgtgtgcccgtctgttgtgtgactctggtaactagagatccctcagacccttttagtcagtgtggaaaatctctagcagggcccgtttaaacccgctgatcagcctcgactgtgccttctagttgccagccatctgttgtttgcccctcccccgtgccttccttgaccctggaaggtgccactcccactgtcctttcctaataaaatgaggaaattgcatcgcattgtctgagtaggtgtcattctattctggggggtggggtggggcaggacagcaagggggaggattgggaagacaatagcaggcatgctggggatgcggtgggctctatggcttctgaggcggaaagaaccagctggggctctagggggtatccccacgcgccctgtagcggcgcattaagcgcggcgggtgtggtggttacgcgcagcgtgaccgctacacttgccagcgccctagcgcccgctcctttcgctttcttcccttcctttctcgccacgttcgccggctttccccgtcaagctctaaatcgggggctccctttagggttccgatttagtgctttacggcacctcgaccccaaaaaacttgattagggtgatggttcacgtagtgggccatcgccctgatagacggtttttcgccctttgacgttggagtccacgttctttaatagtggactcttgttccaaactggaacaacactcaaccctatctcggtctattcttttgatttataagggattttgccgatttcggcctattggttaaaaaatgagctgatttaacaaaaatttaacgcgaattaattctgtggaatgtgtgtcagttagggtgtggaaagtccccaggctccccagcaggcagaagtatgcaaagcatgcatctcaattagtcagcaaccaggtgtggaaagtccccaggctccccagcaggcagaagtatgcaaagcatgcatctcaattagtcagcaaccatagtcccgcccctaactccgcccatcccgcccctaactccgcccagttccgcccattctccgccccatggctgactaattttttttatttatgcagaggccgaggccgcctctgcctctgagctattccagaagtagtgaggaggcttttttggaggcctaggcttttgcaaaaagctcccgggagcttgtatatccattttcggatctgatcagcacgtgttgacaattaatcatcggcatagtatatcggcatagtataatacgacaaggtgaggaactaaaccatggccaagttgaccagtgccgttccggtgctcaccgcgcgcgacgtcgccggagcggtcgagttctggaccgaccggctcgggttctcccgggacttcgtggaggacgacttcgccggtgtggtccgggacgacgtgaccctgttcatcagcgcggtccaggaccaggtggtgccggacaacaccctggcctgggtgtgggtgcgcggcctggacgagctgtacgccgagtggtcggaggtcgtgtccacgaacttccgggacgcctccgggccggccatgaccgagatcggcgagcagccgtgggggcgggagttcgccctgcgcgacccggccggcaactgcgtgcacttcgtggccgaggagcaggactgacacgtgctacgagatttcgattccaccgccgccttctatgaaaggttgggcttcggaatcgttttccgggacgccggctggatgatcctccagcgcggggatctcatgctggagttcttcgcccaccccaacttgtttattgcagcttataatggttacaaataaagcaatagcatcacaaatttcacaaataaagcatttttttcactgcattctagttgtggtttgtccaaactcatcaatgtatcttatcatgtctgtataccgtcgacctctagctagagcttggcgtaatcatggtcatagctgtttcctgtgtgaaattgttatccgctcacaattccacacaacatacgagccggaagcataaagtgtaaagcctggggtgcctaatgagtgagctaactcacattaattgcgttgcgctcactgcccgctttccagtcgggaaacctgtcgtgccagctgcattaatgaatcggccaacgcgcggggagaggcggtttgcgtattgggcgctcttccgcttcctcgctcactgactcgctgcgctcggtcgttcggctgcggcgagcggtatcagctcactcaaaggcggtaatacggttatccacagaatcaggggataacgcaggaaagaacatgtgagcaaaaggccagcaaaaggccaggaaccgtaaaaaggccgcgttgctggcgtttttccataggctccgcccccctgacgagcatcacaaaaatcgacgctcaagtcagaggtggcgaaacccgacaggactataaagataccaggcgtttccccctggaagctccctcgtgcgctctcctgttccgaccctgccgcttaccggatacctgtccgcctttctcccttcgggaagcgtggcgctttctcatagctcacgctgtaggtatctcagttcggtgtaggtcgttcgctccaagctgggctgtgtgcacgaaccccccgttcagcccgaccgctgcgccttatccggtaactatcgtcttgagtccaacccggtaagacacgacttatcgccactggcagcagccactggtaacaggattagcagagcgaggtatgtaggcggtgctacagagttcttgaagtggtggcctaactacggctacactagaagaacagtatttggtatctgcgctctgctgaagccagttaccttcggaaaaagagttggtagctcttgatccggcaaacaaaccaccgctggtagcggtggtttttttgtttgcaagcagcagattacgcgcagaaaaaaaggatctcaagaagatcctttgatcttttctacggggtctgacgctcagtggaacgaaaactcacgttaagggattttggtcatgagattatcaaaaaggatcttcacctagatccttttaaattaaaaatgaagttttaaatcaatctaaagtatatatgagtaaacttggtctgacagttaccaatgcttaatcagtgaggcacctatctcagcgatctgtctatttcgttcatccatagttgcctgactccccgtcgtgtagataactacgatacgggagggcttaccatctggccccagtgctgcaatgataccgcgagacccacgctcaccggctccagatttatcagcaataaaccagccagccggaagggccgagcgcagaagtggtcctgcaactttatccgcctccatccagtctattaattgttgccgggaagctagagtaagtagttcgccagttaatagtttgcgcaacgttgttgccattgctacaggcatcgtggtgtcacgctcgtcgtttggtatggcttcattcagctccggttcccaacgatcaaggcgagttacatgatcccccatgttgtgcaaaaaagcggttagctccttcggtcctccgatcgttgtcagaagtaagttggccgcagtgttatcactcatggttatggcagcactgcataattctcttactgtcatgccatccgtaagatgcttttctgtgactggtgagtactcaaccaagtcattctgagaatagtgtatgcggcgaccgagttgctcttgcccggcgtcaatacgggataataccgcgccacatagcagaactttaaaagtgctcatcattggaaaacgttcttcggggcgaaaactctcaaggatcttaccgctgttgagatccagttcgatgtaacccactcgtgcacccaactgatcttcagcatcttttactttcaccagcgtttctgggtgagcaaaaacaggaaggcaaaatgccgcaaaaaagggaataagggcgacacggaaatgttgaatactcatactcttcctttttcaatattattgaagcatttatcagggttattgtctcatgagcggatacatatttgaatgtatttagaaaaataaacaaataggggttccgcgcacatttccccgaaaagtgccacctgacgtcgacggatcgggagatctcccgatcccctatggtgcactctcagtacaatctgctctgatgccgcatagttaagccagtatctgctccctgcttgtgtgttggaggtcgctgagtagtgcgcgagcaaaatttaagctacaacaaggcaaggcttgaccgacaattgcatgaagaatctgcttagggttaggcgttttgcgctgcttcgcgatgtacgggccagatatacgcgttgacattgattattgactagttattaatagtaatcaattacggggtcattagttcatagcccatatatggagttccgcgttacataacttacggtaaatggcccgcctggctgaccgcccaacgacccccgcccattgacgtcaataatgacgtatgttcccatagtaacgccaatagggactttccattgacgtcaatgggtggagtatttacggtaaactgcccacttggcagtacatcaagtgtatcatatgccaagtacgccccctattgacgtcaatgacggtaaatggcccgcctggcattatgcccagtacatgaccttatgggactttcctacttggcagtacatctacgtattagtcatcgctattaccatggtgatgcggttttggcagtacatcaatgggcgtggatagcggtttgactcacggggatttccaagtctccaccccattgacgtcaatgggagtttgttttggcaccaaaatcaacgggactttccaaaatgtcgtaacaactccgccccattgacgcaaatgggcggtaggcgtgtacggtgggaggtctatataagcagcgcgttttgcct

SEQ ID NO: 22 - DNA, 10155 bp, synthetic construct
  misc_feature 1..10155: note = Synthetic: RMP-008
  source 1..10155: mol_type = other DNA
gtactgggtctctctggttagaccagatctgagcctgggagctctctggctaactagggaacccactgcttaagcctcaataaagcttgccttgagtgcttcaagtagtgtgtgcccgtctgttgtgtgactctggtaactagagatccctcagacccttttagtcagtgtggaaaatctctagcagtggcgcccgaacagggacttgaaagcgaaagggaaaccagaggagctctctcgacgcaggactcggcttgctgaagcgcgcacggcaagaggcgaggggcggcgactggtgagtacgccaaaaattttgactagcggaggctagaaggagagagatgggtgcgagagcgtcagtattaagcgggggagaattagatcgcgatgggaaaaaattcggttaaggccagggggaaagaaaaaatataaattaaaacatatagtatgggcaagcagggagctagaacgattcgcagttaatcctggcctgttagaaacatcagaaggctgtagacaaatactgggacagctacaaccatcccttcagacaggatcagaagaacttagatcattatataatacagtagcaaccctctattgtgtgcatcaaaggatagagataaaagacaccaaggaagctttagacaagatagaggaagagcaaaacaaaagtaagaccaccgcacagcaagcggccgctgatcttcagacctggaggaggagatatgagggacaattggagaagtgaattatataaatataaagtagtaaaaattgaaccattaggagtagcacccaccaaggcaaagagaagagtggtgcagagagaaaaaagagcagtgggaataggagctttgttccttgggttcttgggagcagcaggaagcactatgggcgcagcgtcaatgacgctgacggtacaggccagacaattattgtctggtatagtgcagcagcagaacaatttgctgagggctattgaggcgcaacagcatctgttgcaactcacagtctggggcatcaagcagctccaggcaagaatcctggctgtggaaagatacctaaaggatcaacagctcctggggatttggggttgctctggaaaactcatttgcaccactgctgtgccttggaatgctagttggagtaataaatctctggaacagatttggaatcacacgacctggatggagtgggacagagaaattaacaattacacaagcttaatacactccttaattgaagaatcgcaaaaccagcaagaaaagaatgaacaagaattattggaattagataaatgggcaagtttgtggaattggtttaacataacaaattggctgtggtatataaaattattcataatgatagtaggaggcttggtaggtttaagaatagtttttgctgtactttctatagtgaatagagttaggcagggatattcaccattatcgtttcagacccacctcccaaccccgaggggacccgacaggcccgaaggaatagaagaagaaggtggagagagagacagagacagatccattcgattagtgaacggatcggcactgcgtgcgccaattctgcagacaaatggcagtattcatccacaattttaaaagaaaaggggggattggggggtacagtgcaggggaaagaatagtagacataatagcaacagacatacaaactaaagaattacaaaaacaaattacaaaaattcaaaattttcgggtttattacagggacagcagagatccagtttggttaattaaggatctgcgatcgctccggtgcccgtcagtgggcagagcgcacatcgcccacagtccccgagaagttggggggaggggtcggcaattgaaccggtgcctagagaaggtggcgcggggtaaactgggaaagtgatgtcgtgtactggctccgcctttttcccgagggtgggggagaaccgtatataagtgcagtagtcgccgtgaacgttctttttcgcaacgggtttgccgccagaacacagctgaagcttcgaggggctcgcatctctccttcacgcgcccgccgccctacctgaggccgccatccacgccggttgagtcgcgttctgccgcctcccgcctgtggtgcctcctgaactgcgtccgccgtctaggtaagtttaaagctcaggtcgagaccgggcctttgtccggcgctcccttggagcctacctagactcagccggctctccacgctttgcctgaccctgcttgctcaactctacgtctttgtttcgttttctgttctgcgccgttacagatccaagctgtgaccggcgcctaggatccccgggtaccggtcgtacgttcgaagctagcatgatttcacccttcctggttttggcaattggaacctgccttaccaactcccttgtccctgaaaaggagaaggaccccaaatattggagagaccaggctcaggaaaccctcaagtacgctcttgaactgcaaaagcttaatactaacgtggctaaaaacgtgataatgttcttgggggacggaatgggggtttcaaccgttaccgcggccagaatcttgaaagggcagctgcaccataacccaggcgaagaaacgaggctggagatggacaaatttccattcgtggcgctttctaagacctacaacactaacgcccaggtccctgactcagctggtacggccactgcctacctttgtggagtgaaggcaaatgaggggactgttggtgtttccgcagctactgagagatctcggtgtaatacgactcaaggtaatgaagttacatccatactccgatgggcaaaagacgcgggcaaatctgttgggattgttacaactactagggtgaaccatgcgacaccctctgcagcttatgcgcacagtgccgaccgagactggtattcagataatgagatgccacccgaggcccttagccagggctgcaaggacatagcctatcaattgatgcacaatatcagagacatagacgttataatgggtggtggtcgcaagtacatgtaccccaaaaacaaaaccgacgtagagtatgaatccgatgaaaaagctaggggcaccagactcgacggacttgatctggttgatacatggaaatcctttaaacctcggtataagcattcacatttcatctggaacaggaccgaacttctcacattggacccccacaatgttgactatctcctcggtttgtttgaaccaggggatatgcagtatgagctcaatcggaacaacgtcactgaccccagtttgagtgaaatggtcgttgttgcaatacaaattttgaggaaaaatccaaaggggtttttcttgttggtagagggcggacggatagatcacgggcaccacgaaggcaaagcaaaacaggccctgcacgaagccgttgaaatggatcgcgctatcggtcaagccggctccctgacgagtagtgaagataccttgaccgtcgtcactgcggatcatagccacgtttttacctttgggggatacacccccaggggcaactcaatttttggacttgcaccgatgctcagcgacacagataaaaagccttttactgcgattctgtatggcaacggccctggatacaaagtagtagggggtgaaagggaaaacgtcagcatggtggactatgcacacaataattatcaggcgcagtccgctgttccgctgcggcatgagactcacgggggagaggacgttgctgtcttttccaagggaccaatggctcatcttctccatggagtccatgagcaaaattatgtccctcatgtcatggcatacgctgcatgtataggagcaaatctcgggcactgtgcaccggcgtcctccgctggatctttggcggccgatcccgcagccacagcggcggctctttaccctttgtcagtactcttcgattcctcagactcatcagattcctccgattcatccgattccagtgactcctctgacagtagctgagaattcgatatcaagcttatcgataatcaacctctggattacaaaatttgtgaaagattgactggtattcttaactatgttgctccttttacgctatgtggatacgctgctttaatgcctttgtatcatgctattgcttcccgtatggctttcattttctcctccttgtataaatcctggttgctgtctctttatgaggagttgtggcccgttgtcaggcaacgtggcgtggtgtgcactgtgtttgctgacgcaacccccactggttggggcattgccaccacctgtcagctcctttccgggactttcgctttccccctccctattgccacggcggaactcatcgccgcctgccttgcccgctgctggacaggggctcggctgttgggcactgacaattccgtggtgttgtcggggaaatcatcgtcctttccttggctgctcgcctgtgttgccacctggattctgcgcgggacgtccttctgctacgtcccttcggccctcaatccagcggaccttccttcccgcggcctgctgccggctctgcggcctcttccgcgtcttcgccttcgccctcagacgagtcggatctccctttgggccgcctccccgcatcgataccgtcgacctcgatcgagacctagaaaaacatggagcaatcacaagtagcaatacagcagctaccaatgctgattgtgcctggctagaagcacaagaggaggaggaggtgggttttccagtcacacctcaggtacctttaagaccaatgacttacaaggcagctgtagatcttagccactttttaaaagaaaaggggggactggaagggctaattcactcccaacgaagacaagatatccttgatctgtggatctaccacacacaaggctacttccctgattggcagaactacacaccagggccagggatcagatatccactgacctttggatggtgctacaagctagtaccagttgagcaagagaaggtagaagaagccaatgaaggagagaacacccgcttgttacaccctgtgagcctgcatgggatggatgacccggagagagaagtattagagtggaggtttgacagccgcctagcatttcatcacatggcccgagagctgcatccggactgtactgggtctctctggttagaccagatctgagcctgggagctctctggctaactagggaacccactgcttaagcctcaataaagcttgccttgagtgcttcaagtagtgtgtgcccgtctgttgtgtgactctggtaactagagatccctcagacccttttagtcagtgtggaaaatctctagcagggcccgtttaaacccgctgatcagcctcgactgtgccttctagttgccagccatctgttgtttgcccctcccccgtgccttccttgaccctggaaggtgccactcccactgtcctttcctaataaaatgaggaaattgcatcgcattgtctgagtaggtgtcattctattctggggggtggggtggggcaggacagcaagggggaggattgggaagacaatagcaggcatgctggggatgcggtgggctctatggcttctgaggcggaaagaaccagctggggctctagggggtatccccacgcgccctgtagcggcgcattaagcgcggcgggtgtggtggttacgcgcagcgtgaccgctacacttgccagcgccctagcgcccgctcctttcgctttcttcccttcctttctcgccacgttcgccggctttccccgtcaagctctaaatcgggggctccctttagggttccgatttagtgctttacggcacctcgaccccaaaaaacttgattagggtgatggttcacgtagtgggccatcgccctgatagacggtttttcgccctttgacgttggagtccacgttctttaatagtggactcttgttccaaactggaacaacactcaaccctatctcggtctattcttttgatttataagggattttgccgatttcggcctattggttaaaaaatgagctgatttaacaaaaatttaacgcgaattaattctgtggaatgtgtgtcagttagggtgtggaaagtccccaggctccccagcaggcagaagtatgcaaagcatgcatctcaattagtcagcaaccaggtgtggaaagtccccaggctccccagcaggcagaagtatgcaaagcatgcatctcaattagtcagcaaccatagtcccgcccctaactccgcccatcccgcccctaactccgcccagttccgcccattctccgccccatggctgactaattttttttatttatgcagaggccgaggccgcctctgcctctgagctattccagaagtagtgaggaggcttttttggaggcctaggcttttgcaaaaagctcccgggagcttgtatatccattttcggatctgatcagcacgtgttgacaattaatcatcggcatagtatatcggcatagtataatacgacaaggtgaggaactaaaccatggccaagttgaccagtgccgttccggtgctcaccgcgcgcgacgtcgccggagcggtcgagttctggaccgaccggctcgggttctcccgggacttcgtggaggacgacttcgccggtgtggtccgggacgacgtgaccctgttcatcagcgcggtccaggaccaggtggtgccggacaacaccctggcctgggtgtgggtgcgcggcctggacgagctgtacgccgagtggtcggaggtcgtgtccacgaacttccgggacgcctccgggccggccatgaccgagatcggcgagcagccgtgggggcgggagttcgccctgcgcgacccggccggcaactgcgtgcacttcgtggccgaggagcaggactgacacgtgctacgagatttcgattccaccgccgccttctatgaaaggttgggcttcggaatcgttttccgggacgccggctggatgatcctccagcgcggggatctcatgctggagttcttcgcccaccccaacttgtttattgcagcttataatggttacaaataaagcaatagcatcacaaatttcacaaataaagcatttttttcactgcattctagttgtggtttgtccaaactcatcaatgtatcttatcatgtctgtataccgtcgacctctagctagagcttggcgtaatcatggtcatagctgtttcctgtgtgaaattgttatccgctcacaattccacacaacatacgagccggaagcataaagtgtaaagcctggggtgcctaatgagtgagctaactcacattaattgcgttgcgctcactgcccgctttccagtcgggaaacctgtcgtgccagctgcattaatgaatcggccaacgcgcggggagaggcggtttgcgtattgggcgctcttccgcttcctcgctcactgactcgctgcgctcggtcgttcggctgcggcgagcggtatcagctcactcaaaggcggtaatacggttatccacagaatcaggggataacgcaggaaagaacatgtgagcaaaaggccagcaaaaggccaggaaccgtaaaaaggccgcgttgctggcgtttttccataggctccgcccccctgacgagcatcacaaaaatcgacgctcaagtcagaggtggcgaaacccgacaggactataaagataccaggcgtttccccctggaagctccctcgtgcgctctcctgttccgaccctgccgcttaccggatacctgtccgcctttctcccttcgggaagcgtggcgctttctcatagctcacgctgtaggtatctcagttcggtgtaggtcgttcgctccaagctgggctgtgtgcacgaaccccccgttcagcccgaccgctgcgccttatccggtaactatcgtcttgagtccaacccggtaagacacgacttatcgccactggcagcagccactggtaacaggattagcagagcgaggtatgtaggcggtgctacagagttcttgaagtggtggcctaactacggctacactagaagaacagtatttggtatctgcgctctgctgaagccagttaccttcggaaaaagagttggtagctcttgatccggcaaacaaaccaccgctggtagcggtggtttttttgtttgcaagcagcagattacgcgcagaaaaaaaggatctcaagaagatcctttgatcttttctacggggtctgacgctcagtggaacgaaaactcacgttaagggattttggtcatgagattatcaaaaaggatcttcacctagatccttttaaattaaaaatgaagttttaaatcaatctaaagtatatatgagtaaacttggtctgacagttaccaatgcttaatcagtgaggcacctatctcagcgatctgtctatttcgttcatccatagttgcctgactccccgtcgtgtagataactacgatacgggagggcttaccatctggccccagtgctgcaatgataccgcgagacccacgctcaccggctccagatttatcagcaataaaccagccagccggaagggccgagcgcagaagtggtcctgcaactttatccgcctccatccagtctattaattgttgccgggaagctagagtaagtagttcgccagttaatagtttgcgcaacgttgttgccattgctacaggcatcgtggtgtcacgctcgtcgtttggtatggcttcattcagctccggttcccaacgatcaaggcgagttacatgatcccccatgttgtgcaaaaaagcggttagctccttcggtcctccgatcgttgtcagaagtaagttggccgcagtgttatcactcatggttatggcagcactgcataattctcttactgtcatgccatccgtaagatgcttttctgtgactggtgagtactcaaccaagtcattctgagaatagtgtatgcggcgaccgagttgctcttgcccggcgtcaatacgggataataccgcgccacatagcagaactttaaaagtgctcatcattggaaaacgttcttcggggcgaaaactctcaaggatcttaccgctgttgagatccagttcgatgtaacccactcgtgcacccaactgatcttcagcatcttttactttcaccagcgtttctgggtgagcaaaaacaggaaggcaaaatgccgcaaaaaagggaataagggcgacacggaaatgttgaatactcatactcttcctttttcaatattattgaagcatttatcagggttattgtctcatgagcggatacatatttgaatgtatttagaaaaataaacaaataggggttccgcgcacatttccccgaaaagtgccacctgacgtcgacggatcgggagatctcccgatcccctatggtgcactctcagtacaatctgctctgatgccgcatagttaagccagtatctgctccctgcttgtgtgttggaggtcgctgagtagtgcgcgagcaaaatttaagctacaacaaggcaaggcttgaccgacaattgcatgaagaatctgcttagggttaggcgttttgcgctgcttcgcgatgtacgggccagatatacgcgttgacattgattattgactagttattaatagtaatcaattacggggtcattagttcatagcccatatatggagttccgcgttacataacttacggtaaatggcccgcctggctgaccgcccaacgacccccgcccattgacgtcaataatgacgtatgttcccatagtaacgccaatagggactttccattgacgtcaatgggtggagtatttacggtaaactgcccacttggcagtacatcaagtgtatcatatgccaagtacgccccctattgacgtcaatgacggtaaatggcccgcctggcattatgcccagtacatgaccttatgggactttcctacttggcagtacatctacgtattagtcatcgctattaccatggtgatgcggttttggcagtacatcaatgggcgtggatagcggtttgactcacggggatttccaagtctccaccccattgacgtcaatgggagtttgttttggcaccaaaatcaacgggactttccaaaatgtcgtaacaactccgccccattgacgcaaatgggcggtaggcgtgtacggtgggaggtctatataagcagcgcgttttgcct

SEQ ID NO: 23 - DNA, 10092 bp, synthetic construct
  misc_feature 1..10092: note = Synthetic: RMP-000
  source 1..10092: mol_type = other DNA
gtactgggtctctctggttagaccagatctgagcctgggagctctctggctaactagggaacccactgcttaagcctcaataaagcttgccttgagtgcttcaagtagtgtgtgcccgtctgttgtgtgactctggtaactagagatccctcagacccttttagtcagtgtggaaaatctctagcagtggcgcccgaacagggacttgaaagcgaaagggaaaccagaggagctctctcgacgcaggactcggcttgctgaagcgcgcacggcaagaggcgaggggcggcgactggtgagtacgccaaaaattttgactagcggaggctagaaggagagagatgggtgcgagagcgtcagtattaagcgggggagaattagatcgcgatgggaaaaaattcggttaaggccagggggaaagaaaaaatataaattaaaacatatagtatgggcaagcagggagctagaacgattcgcagttaatcctggcctgttagaaacatcagaaggctgtagacaaatactgggacagctacaaccatcccttcagacaggatcagaagaacttagatcattatataatacagtagcaaccctctattgtgtgcatcaaaggatagagataaaagacaccaaggaagctttagacaagatagaggaagagcaaaacaaaagtaagaccaccgcacagcaagcggccgctgatcttcagacctggaggaggagatatgagggacaattggagaagtgaattatataaatataaagtagtaaaaattgaaccattaggagtagcacccaccaaggcaaagagaagagtggtgcagagagaaaaaagagcagtgggaataggagctttgttccttgggttcttgggagcagcaggaagcactatgggcgcagcgtcaatgacgctgacggtacaggccagacaattattgtctggtatagtgcagcagcagaacaatttgctgagggctattgaggcgcaacagcatctgttgcaactcacagtctggggcatcaagcagctccaggcaagaatcctggctgtggaaagatacctaaaggatcaacagctcctggggatttggggttgctctggaaaactcatttgcaccactgctgtgccttggaatgctagttggagtaataaatctctggaacagatttggaatcacacgacctggatggagtgggacagagaaattaacaattacacaagcttaatacactccttaattgaagaatcgcaaaaccagcaagaaaagaatgaacaagaattattggaattagataaatgggcaagtttgtggaattggtttaacataacaaattggctgtggtatataaaattattcataatgatagtaggaggcttggtaggtttaagaatagtttttgctgtactttctatagtgaatagagttaggcagggatattcaccattatcgtttcagacccacctcccaaccccgaggggacccgacaggcccgaaggaatagaagaagaaggtggagagagagacagagacagatccattcgattagtgaacggatcggcactgcgtgcgccaattctgcagacaaatggcagtattcatccacaattttaaaagaaaaggggggattggggggtacagtgcaggggaaagaatagtagacataatagcaacagacatacaaactaaagaattacaaaaacaaattacaaaaattcaaaattttcgggtttattacagggacagcagagatccagtttggttaattaaggatctgcgatcgctccggtgcccgtcagtgggcagagcgcacatcgcccacagtccccgagaagttggggggaggggtcggcaattgaaccggtgcctagagaaggtggcgcggggtaaactgggaaagtgatgtcgtgtactggctccgcctttttcccgagggtgggggagaaccgtatataagtgcagtagtcgccgtgaacgttctttttcgcaacgggtttgccgccagaacacagctgaagcttcgaggggctcgcatctctccttcacgcgcccgccgccctacctgaggccgccatccacgccggttgagtcgcgttctgccgcctcccgcctgtggtgcctcctgaactgcgtccgccgtctaggtaagtttaaagctcaggtcgagaccgggcctttgtccggcgctcccttggagcctacctagactcagccggctctccacgctttgcctgaccctgcttgctcaactctacgtctttgtttcgttttctgttctgcgccgttacagatccaagctgtgaccggcgcctaggatccccgggtaccggtcgtacgttcgaagctagcatgatttcaccattcttagtactggccattggcacctgccttactaactccttagtgccagagaaagagaaagaccccaagtactggcgagaccaagcgcaagagacactgaaatatgccctggagcttcagaagctcaacaccaacgtggctaagaatgtcatcatgttcctgggagatgggatgggtgtctccacagtgacggctgcccgcatcctcaagggtcagctccaccacaaccctggggaggagaccaggctggagatggacaagttccccttcgtggccctctccaagacgtacaacaccaatgcccaggtccctgacagtgccggcaccgccaccgcctacctgtgtggggtgaaggccaatgagggcaccgtgggggtaagcgcagccactgagcgttcccggtgcaacaccacccaggggaacgaggtcacctccatcctgcgctgggccaaggacgctgggaaatctgtgggcattgtgaccaccacgagagtgaaccatgccacccccagcgccgcctacgcccactcggctgaccgggactggtactcagacaacgagatgccccctgaggccttgagccagggctgtaaggacatcgcctaccagctcatgcataacatcagggacattgacgtgatcatggggggtggccggaaatacatgtaccccaagaataaaactgatgtggagtatgagagtgacgagaaagccaggggcacgaggctggacggcctggacctcgttgacacctggaagagcttcaaaccgagatacaagcactcccacttcatctggaaccgcacggaactcctgacccttgacccccacaatgtggactacctattgggtctcttcgagccaggggacatgcagtacgagctgaacaggaacaacgtgacggacccgtcactctccgagatggtggtggtggccatccagatcctgcggaagaaccccaaaggcttcttcttgctggtggaaggaggcagaattgaccacgggcaccatgaaggaaaagccaagcaggccctgcatgaggcggtggagatggaccgggccatcgggcaggcaggcagcttgacctcctcggaagacactctgaccgtggtcactgcggaccattcccacgtcttcacatttggtggatacaccccccgtggcaactctatctttggtctggcccccatgctgagtgacacagacaagaagcccttcactgccatcctgtatggcaatgggcctggctacaaggtggtgggcggtgaacgagagaatgtctccatggtggactatgctcacaacaactaccaggcgcagtctgctgtgcccctgcgccacgagacccacggcggggaggacgtggccgtcttctccaagggccccatggcgcacctgctgcacggcgtccacgagcagaactacgtcccccacgtgatggcgtatgcagcctgcatcggggccaacctcggccactgtgctcctgccagctcggcaggcagccttgctgcaggccccctgctgctcgcgctggccctctaccccctgagcgtcctgttctgagaattcgatatcaagcttatcgataatcaacctctggattacaaaatttgtgaaagattgactggtattcttaactatgttgctccttttacgctatgtggatacgctgctttaatgcctttgtatcatgctattgcttcccgtatggctttcattttctcctccttgtataaatcctggttgctgtctctttatgaggagttgtggcccgttgtcaggcaacgtggcgtggtgtgcactgtgtttgctgacgcaacccccactggttggggcattgccaccacctgtcagctcctttccgggactttcgctttccccctccctattgccacggcggaactcatcgccgcctgccttgcccgctgctggacaggggctcggctgttgggcactgacaattccgtggtgttgtcggggaaatcatcgtcctttccttggctgctcgcctgtgttgccacctggattctgcgcgggacgtccttctgctacgtcccttcggccctcaatccagcggaccttccttcccgcggcctgctgccggctctgcggcctcttccgcgtcttcgccttcgccctcagacgagtcggatctccctttgggccgcctccccgcatcgataccgtcgacctcgatcgagacctagaaaaacatggagcaatcacaagtagcaatacagcagctaccaatgctgattgtgcctggctagaagcacaagaggaggaggaggtgggttttccagtcacacctcaggtacctttaagaccaatgacttacaaggcagctgtagatcttagccactttttaaaagaaaaggggggactggaagggctaattcactcccaacgaagacaagatatccttgatctgtggatctaccacacacaaggctacttccctgattggcagaactacacaccagggccagggatcagatatccactgacctttggatggtgctacaagctagtaccagttgagcaagagaaggtagaagaagccaatgaaggagagaacacccgcttgttacaccctgtgagcctgcatgggatggatgacccggagagagaagtattagagtggaggtttgacagccgcctagcatttcatcacatggcccgagagctgcatccggactgtactgggtctctctggttagaccagatctgagcctgggagctctctggctaactagggaacccactgcttaagcctcaataaagcttgccttgagtgcttcaagtagtgtgtgcccgtctgttgtgtgactctggtaactagagatccctcagacccttttagtcagtgtggaaaatctctagcagggcccgtttaaacccgctgatcagcctcgactgtgccttctagttgccagccatctgttgtttgcccctcccccgtgccttccttgaccctggaaggtgccactcccactgtcctttcctaataaaatgaggaaattgcatcgcattgtctgagtaggtgtcattctattctggggggtggggtggggcaggacagcaagggggaggattgggaagacaatagcaggcatgctggggatgcggtgggctctatggcttctgaggcggaaagaaccagctggggctctagggggtatccccacgcgccctgtagcggcgcattaagcgcggcgggtgtggtggttacgcgcagcgtgaccgctacacttgccagcgccctagcgcccgctcctttcgctttcttcccttcctttctcgccacgttcgccggctttccccgtcaagctctaaatcgggggctccctttagggttccgatttagtgctttacggcacctcgaccccaaaaaacttgattagggtgatggttcacgtagtgggccatcgccctgatagacggtttttcgccctttgacgttggagtccacgttctttaatagtggactcttgttccaaactggaacaacactcaaccctatctcggtctattcttttgatttataagggattttgccgatttcggcctattggttaaaaaatgagctgatttaacaaaaatttaacgcgaattaattctgtggaatgtgtgtcagttagggtgtggaaagtccccaggctccccagcaggcagaagtatgcaaagcatgcatctcaattagtcagcaaccaggtgtggaaagtccccaggctccccagcaggcagaagtatgcaaagcatgcatctcaattagtcagcaaccatagtcccgcccctaactccgcccatcccgcccctaactccgcccagttccgcccattctccgccccatggctgactaattttttttatttatgcagaggccgaggccgcctctgcctctgagctattccagaagtagtgaggaggcttttttggaggcctaggcttttgcaaaaagctcccgggagcttgtatatccattttcggatctgatcagcacgtgttgacaattaatcatcggcatagtatatcggcatagtataatacgacaaggtgaggaactaaaccatggccaagttgaccagtgccgttccggtgctcaccgcgcgcgacgtcgccggagcggtcgagttctggaccgaccggctcgggttctcccgggacttcgtggaggacgacttcgccggtgtggtccgggacgacgtgaccctgttcatcagcgcggtccaggaccaggtggtgccggacaacaccctggcctgggtgtgggtgcgcggcctggacgagctgtacgccgagtggtcggaggtcgtgtccacgaacttccgggacgcctccgggccggccatgaccgagatcggcgagcagccgtgggggcgggagttcgccctgcgcgacccggccggcaactgcgtgcacttcgtggccgaggagcaggactgacacgtgctacgagatttcgattccaccgccgccttctatgaaaggttgggcttcggaatcgttttccgggacgccggctggatgatcctccagcgcggggatctcatgctggagttcttcgcccaccccaacttgtttattgcagcttataatggttacaaataaagcaatagcatcacaaatttcacaaataaagcatttttttcactgcattctagttgtggtttgtccaaactcatcaatgtatcttatcatgtctgtataccgtcgacctctagctagagcttggcgtaatcatggtcatagctgtttcctgtgtgaaattgttatccgctcacaattccacacaacatacgagccggaagcataaagtgtaaagcctggggtgcctaatgagtgagctaactcacattaattgcgttgcgctcactgcccgctttccagtcgggaaacctgtcgtgccagctgcattaatgaatcggccaacgcgcggggagaggcggtttgcgtattgggcgctcttccgcttcctcgctcactgactcgctgcgctcggtcgttcggctgcggcgagcggtatcagctcactcaaaggcggtaatacggttatccacagaatcaggggataacgcaggaaagaacatgtgagcaaaaggccagcaaaaggccaggaaccgtaaaaaggccgcgttgctggcgtttttccataggctccgcccccctgacgagcatcacaaaaatcgacgctcaagtcagaggtggcgaaacccgacaggactataaagataccaggcgtttccccctggaagctccctcgtgcgctctcctgttccgaccctgccgcttaccggatacctgtccgcctttctcccttcgggaagcgtggcgctttctcatagctcacgctgtaggtatctcagttcggtgtaggtcgttcgctccaagctgggctgtgtgcacgaaccccccgttcagcccgaccgctgcgccttatccggtaactatcgtcttgagtccaacccggtaagacacgacttatcgccactggcagcagccactggtaacaggattagcagagcgaggtatgtaggcggtgctacagagttcttgaagtggtggcctaactacggctacactagaagaacagtatttggtatctgcgctctgctgaagccagttaccttcggaaaaagagttggtagctcttgatccggcaaacaaaccaccgctggtagcggtggtttttttgtttgcaagcagcagattacgcgcagaaaaaaaggatctcaagaagatcctttgatcttttctacggggtctgacgctcagtggaacgaaaactcacgttaagggattttggtcatgagattatcaaaaaggatcttcacctagatccttttaaattaaaaatgaagttttaaatcaatctaaagtatatatgagtaaacttggtctgacagttaccaatgcttaatcagtgaggcacctatctcagcgatctgtctatttcgttcatccatagttgcctgactccccgtcgtgtagataactacgatacgggagggcttaccatctggccccagtgctgcaatgataccgcgagacccacgctcaccggctccagatttatcagcaataaaccagccagccggaagggccgagcgcagaagtggtcctgcaactttatccgcctccatccagtctattaattgttgccgggaagctagagtaagtagttcgccagttaatagtttgcgcaacgttgttgccattgctacaggcatcgtggtgtcacgctcgtcgtttggtatggcttcattcagctccggttcccaacgatcaaggcgagttacatgatcccccatgttgtgcaaaaaagcggttagctccttcggtcctccgatcgttgtcagaagtaagttggccgcagtgttatcactcatggttatggcagcactgcataattctcttactgtcatgccatccgtaagatgcttttctgtgactggtgagtactcaaccaagtcattctgagaatagtgtatgcggcgaccgagttgctcttgcccggcgtcaatacgggataataccgcgccacatagcagaactttaaaagtgctcatcattggaaaacgttcttcggggcgaaaactctcaaggatcttaccgctgttgagatccagttcgatgtaacccactcgtgcacccaactgatcttcagcatcttttactttcaccagcgtttctgggtgagcaaaaacaggaaggcaaaatgccgcaaaaaagggaataagggcgacacggaaatgttgaatactcatactcttcctttttcaatattattgaagcatttatcagggttattgtctcatgagcggatacatatttgaatgtatttagaaaaataaacaaataggggttccgcgcacatttccccgaaaagtgccacctgacgtcgacggatcgggagatctcccgatcccctatggtgcactctcagtacaatctgctctgatgccgcatagttaagccagtatctgctccctgcttgtgtgttggaggtcgctgagtagtgcgcgagcaaaatttaagctacaacaaggcaaggcttgaccgacaattgcatgaagaatctgcttagggttaggcgttttgcgctgcttcgcgatgtacgggccagatatacgcgttgacattgattattgactagttattaatagtaatcaattacggggtcattagttcatagcccatatatggagttccgcgttacataacttacggtaaatggcccgcctggctgaccgcccaacgacccccgcccattgacgtcaataatgacgtatgttcccatagtaacgccaatagggactttccattgacgtcaatgggtggagtatttacggtaaactgcccacttggcagtacatcaagtgtatcatatgccaagtacgccccctattgacgtcaatgacggtaaatggcccgcctggcattatgcccagtacatgaccttatgggactttcctacttggcagtacatctacgtattagtcatcgctattaccatggtgatgcggttttggcagtacatcaatgggcgtggatagcggtttgactcacggggatttccaagtctccaccccattgacgtcaatgggagtttgttttggcaccaaaatcaacgggactttccaaaatgtcgtaacaactccgccccattgacgcaaatgggcggtaggcgtgtacggtgggaggtctatataagcagcgcgttttgcct

SEQ ID NO: 24 - DNA, 10749 bp, synthetic construct
  misc_feature 1..10749: note = Synthetic: RMP5.1FC
  source 1..10749: mol_type = other DNA
gtactgggtctctctggttagaccagatctgagcctgggagctctctggctaactagggaacccactgcttaagcctcaataaagcttgccttgagtgcttcaagtagtgtgtgcccgtctgttgtgtgactctggtaactagagatccctcagacccttttagtcagtgtggaaaatctctagcagtggcgcccgaacagggacttgaaagcgaaagggaaaccagaggagctctctcgacgcaggactcggcttgctgaagcgcgcacggcaagaggcgaggggcggcgactggtgagtacgccaaaaattttgactagcggaggctagaaggagagagatgggtgcgagagcgtcagtattaagcgggggagaattagatcgcgatgggaaaaaattcggttaaggccagggggaaagaaaaaatataaattaaaacatatagtatgggcaagcagggagctagaacgattcgcagttaatcctggcctgttagaaacatcagaaggctgtagacaaatactgggacagctacaaccatcccttcagacaggatcagaagaacttagatcattatataatacagtagcaaccctctattgtgtgcatcaaaggatagagataaaagacaccaaggaagctttagacaagatagaggaagagcaaaacaaaagtaagaccaccgcacagcaagcggccgctgatcttcagacctggaggaggagatatgagggacaattggagaagtgaattatataaatataaagtagtaaaaattgaaccattaggagtagcacccaccaaggcaaagagaagagtggtgcagagagaaaaaagagcagtgggaataggagctttgttccttgggttcttgggagcagcaggaagcactatgggcgcagcgtcaatgacgctgacggtacaggccagacaattattgtctggtatagtgcagcagcagaacaatttgctgagggctattgaggcgcaacagcatctgttgcaactcacagtctggggcatcaagcagctccaggcaagaatcctggctgtggaaagatacctaaaggatcaacagctcctggggatttggggttgctctggaaaactcatttgcaccactgctgtgccttggaatgctagttggagtaataaatctctggaacagatttggaatcacacgacctggatggagtgggacagagaaattaacaattacacaagcttaatacactccttaattgaagaatcgcaaaaccagcaagaaaagaatgaacaagaattattggaattagataaatgggcaagtttgtggaattggtttaacataacaaattggctgtggtatataaaattattcataatgatagtaggaggcttggtaggtttaagaatagtttttgctgtactttctatagtgaatagagttaggcagggatattcaccattatcgtttcagacccacctcccaaccccgaggggacccgacaggcccgaaggaatagaagaagaaggtggagagagagacagagacagatccattcgattagtgaacggatcggcactgcgtgcgccaattctgcagacaaatggcagtattcatccacaattttaaaagaaaaggggggattggggggtacagtgcaggggaaagaatagtagacataatagcaacagacatacaaactaaagaattacaaaaacaaattacaaaaattcaaaattttcgggtttattacagggacagcagagatccagtttggttaattaaggatctgcgatcgctccggtgcccgtcagtgggcagagcgcacatcgcccacagtccccgagaagttggggggaggggtcggcaattgaaccggtgcctagagaaggtggcgcggggtaaactgggaaagtgatgtcgtgtactggctccgcctttttcccgagggtgggggagaaccgtatataagtgcagtagtcgccgtgaacgttctttttcgcaacgggtttgccgccagaacacagctgaagcttcgaggggctcgcatctctccttcacgcgcccgccgccctacctgaggccgccatccacgccggttgagtcgcgttctgccgcctcccgcctgtggtgcctcctgaactgcgtccgccgtctaggtaagtttaaagctcaggtcgagaccgggcctttgtccggcgctcccttggagcctacctagactcagccggctctccacgctttgcctgaccctgcttgctcaactctacgtctttgtttcgttttctgttctgcgccgttacagatccaagctgtgaccggcgcctaggatccccgggtaccggtcgtacgttcgaagctagcatgataagtcccttcctcgtccttgccataggtacctgtctcaccaattcacttgtgccggagaaggaaaaagacccgaagtactggagggaccaggcccaggagacactcaagtatgctttggagctgcagaagctcaacaccaatgtcgccaaaaacgtgataatgttcctcggtgacggcatgggggtatctactgtaacggcggcacgcatcctgaaaggacagctgcaccacaatccaggcgaggagacccggctggaaatggacaagtttccattcgtggctttgtccaaaacttacaacaccaacgcacaagttcctgattctgccggtacggccactgcctacctctgtggcgtcaaggcaaatgaggggactgtgggggtatctgcggcaactgagaggagccgatgcaacacgacgcagggtaacgaggtgacatctatcctgaggtgggcaaaggacgcgggaaaaagcgtcggaatagtaacgaccacaagggtaaaccacgctacccctagcgcagcgtatgcacattcagccgatcgggattggtacagtgacaatgaaatgccgcctgaagctctgtcccagggttgcaaagatatcgcctatcagctgatgcataatatccgcgatattgacgtaatcatggggggtggacgaaaatatatgtacccaaaaaataaaacagatgtagaatatgaatctgatgagaaggcccggggtacaaggcttgatggtctcgatcttgtcgacacgtggaaatcattcaaacctcggtataaacacagccattttatctggaataggactgaattgcttacgcttgatccacacaacgtagactatttgctgggcctttttgagccgggagatatgcagtacgaacttaaccggaacaatgtgactgacccttctcttagcgagatggtggtagtggcgattcagatactcagaaaaaatcccaagggtttttttctcctggtcgagggcggaagaatcgatcatggacatcacgaaggaaaagcgaagcaagcacttcatgaagccgtagagatggatagggcaataggtcaggcaggctcacttacgtcaagtgaagatacccttacggtggtgacagctgaccacagccacgtctttactttcggcggctataccccccgaggcaattcaatctttgggttggcgcccatgctttcagatactgataagaaaccttttacagccatcttgtatggtaatgggcctgggtataaggtagttggtggtgagagggagaatgtatcaatggtcgattacgcacataataactaccaagctcagtcagcagtacctctgaggcatgaaacacacggcggagaggacgtagcagtattttcaaaaggcccaatggcccatctgctgcatggggtacatgagcaaaattatgtgccccatgtgatggcatatgcagcctgcatcggagcaaatctcgggcactgtgctcccgcctcaagtctcaaagacaaaacacacacttgtccaccttgcccggcacctgaacttctgggcggcccgagcgtttttttgttccctcctaaacctaaggacacgctcatgatcagccgcacgccagaggttacctgtgtagtggtggatgtcagccacgaggatccggaagtaaaattcaactggtatgtagatggggtggaggttcacaatgccaaaaccaagccacgagaggaacagtacaatagtacttaccgggtcgtgtctgtattgaccgtcctgcatcaggattggttgaacgggaaagaatataagtgcaaggtgagcaacaaagcacttccggccccaatagagaaaacaattagtaaagcaaaaggacaaccacgggaaccgcaagtttatacactgccgccctctcgagacgagctgaccaaaaatcaggttagccttacatgtttggtcaaggggttctacccgagtgatattgcagtggaatgggaatccaacggtcaaccagaaaataactacaaaactactccgccggtgttggattcagacggctctttctttctgtatagcaaactcactgttgacaagtcaagatggcagcagggcaatgtatttagctgtagtgttatgcacgaagctcttcataaccactacacacaaaagtcactttctctttccccaggaaaagacatcgatgacgatgacgatgatgacgacgacgattgagaattcgatatcaagcttatcgataatcaacctctggattacaaaatttgtgaaagattgactggtattcttaactatgttgctccttttacgctatgtggatacgctgctttaatgcctttgtatcatgctattgcttcccgtatggctttcattttctcctccttgtataaatcctggttgctgtctctttatgaggagttgtggcccgttgtcaggcaacgtggcgtggtgtgcactgtgtttgctgacgcaacccccactggttggggcattgccaccacctgtcagctcctttccgggactttcgctttccccctccctattgccacggcggaactcatcgccgcctgccttgcccgctgctggacaggggctcggctgttgggcactgacaattccgtggtgttgtcggggaaatcatcgtcctttccttggctgctcgcctgtgttgccacctggattctgcgcgggacgtccttctgctacgtcccttcggccctcaatccagcggaccttccttcccgcggcctgctgccggctctgcggcctcttccgcgtcttcgccttcgccctcagacgagtcggatctccctttgggccgcctccccgcatcgataccgtcgacctcgatcgagacctagaaaaacatggagcaatcacaagtagcaatacagcagctaccaatgctgattgtgcctggctagaagcacaagaggaggaggaggtgggttttccagtcacacctcaggtacctttaagaccaatgacttacaaggcagctgtagatcttagccactttttaaaagaaaaggggggactggaagggctaattcactcccaacgaagacaagatatccttgatctgtggatctaccacacacaaggctacttccctgattggcagaactacacaccagggccagggatcagatatccactgacctttggatggtgctacaagctagtaccagttgagcaagagaaggtagaagaagccaatgaaggagagaacacccgcttgttacaccctgtgagcctgcatgggatggatgacccggagagagaagtattagagtggaggtttgacagccgcctagcatttcatcacatggcccgagagctgcatccggactgtactgggtctctctggttagaccagatctgagcctgggagctctctggctaactagggaacccactgcttaagcctcaataaagcttgccttgagtgcttcaagtagtgtgtgcccgtctgttgtgtgactctggtaactagagatccctcagacccttttagtcagtgtggaaaatctctagcagggcccgtttaaacccgctgatcagcctcgactgtgccttctagttgccagccatctgttgtttgcccctcccccgtgccttccttgaccctggaaggtgccactcccactgtcctttcctaataaaatgaggaaattgcatcgcattgtctgagtaggtgtcattctattctggggggtggggtggggcaggacagcaagggggaggattgggaagacaatagcaggcatgctggggatgcggtgggctctatggcttctgaggcggaaagaaccagctggggctctagggggtatccccacgcgccctgtagcggcgcattaagcgcggcgggtgtggtggttacgcgcagcgtgaccgctacacttgccagcgccctagcgcccgctcctttcgctttcttcccttcctttctcgccacgttcgccggctttccccgtcaagctctaaatcgggggctccctttagggttccgatttagtgctttacggcacctcgaccccaaaaaacttgattagggtgatggttcacgtagtgggccatcgccctgatagacggtttttcgccctttgacgttggagtccacgttctttaatagtggactcttgttccaaactggaacaacactcaaccctatctcggtctattcttttgatttataagggattttgccgatttcggcctattggttaaaaaatgagctgatttaacaaaaatttaacgcgaattaattctgtggaatgtgtgtcagttagggtgtggaaagtccccaggctccccagcaggcagaagtatgcaaagcatgcatctcaattagtcagcaaccaggtgtggaaagtccccaggctccccagcaggcagaagtatgcaaagcatgcatctcaattagtcagcaaccatagtcccgcccctaactccgcccatcccgcccctaactccgcccagttccgcccattctccgccccatggctgactaattttttttatttatgcagaggccgaggccgcctctgcctctgagctattccagaagtagtgaggaggcttttttggaggcctaggcttttgcaaaaagctcccgggagcttgtatatccattttcggatctgatcagcacgtgttgacaattaatcatcggcatagtatatcggcatagtataatacgacaaggtgaggaactaaaccatggccaagttgaccagtgccgttccggtgctcaccgcgcgcgacgtcgccggagcggtcgagttctggaccgaccggctcgggttctcccgggacttcgtggaggacgacttcgccggtgtggtccgggacgacgtgaccctgttcatcagcgcggtccaggaccaggtggtgccggacaacaccctggcctgggtgtgggtgcgcggcctggacgagctgtacgccgagtggtcggaggtcgtgtccacgaacttccgggacgcctccgggccggccatgaccgagatcggcgagcagccgtgggggcgggagttcgccctgcgcgacccggccggcaactgcgtgcacttcgtggccgaggagcaggactgacacgtgctacgagatttcgattccaccgccgccttctatgaaaggttgggcttcggaatcgttttccgggacgccggctggatgatcctccagcgcggggatctcatgctggagttcttcgcccaccccaacttgtttattgcagcttataatggttacaaataaagcaatagcatcacaaatttcacaaataaagcatttttttcactgcattctagttgtggtttgtccaaactcatcaatgtatcttatcatgtctgtataccgtcgacctctagctagagcttggcgtaatcatggtcatagctgtttcctgtgtgaaattgttatccgctcacaattccacacaacatacgagccggaagcataaagtgtaaagcctggggtgcctaatgagtgagctaactcacattaattgcgttgcgctcactgcccgctttccagtcgggaaacctgtcgtgccagctgcattaatgaatcggccaacgcgcggggagaggcggtttgcgtattgggcgctcttccgcttcctcgctcactgactcgctgcgctcggtcgttcggctgcggcgagcggtatcagctcactcaaaggcggtaatacggttatccacagaatcaggggataacgcaggaaagaacatgtgagcaaaaggccagcaaaaggccaggaaccgtaaaaaggccgcgttgctggcgtttttccataggctccgcccccctgacgagcatcacaaaaatcgacgctcaagtcagaggtggcgaaacccgacaggactataaagataccaggcgtttccccctggaagctccctcgtgcgctctcctgttccgaccctgccgcttaccggatacctgtccgcctttctcccttcgggaagcgtggcgctttctcatagctcacgctgtaggtatctcagttcggtgtaggtcgttcgctccaagctgggctgtgtgcacgaaccccccgttcagcccgaccgctgcgccttatccggtaactatcgtcttgagtccaacccggtaagacacgacttatcgccactggcagcagccactggtaacaggattagcagagcgaggtatgtaggcggtgctacagagttcttgaagtggtggcctaactacggctacactagaagaacagtatttggtatctgcgctctgctgaagccagttaccttcggaaaaagagttggtagctcttgatccggcaaacaaaccaccgctggtagcggtggtttttttgtttgcaagcagcagattacgcgcagaaaaaaaggatctcaagaagatcctttgatcttttctacggggtctgacgctcagtggaacgaaaactcacgttaagggattttggtcatgagattatcaaaaaggatcttcacctagatccttttaaattaaaaatgaagttttaaatcaatctaaagtatatatgagtaaacttggtctgacagttaccaatgcttaatcagtgaggcacctatctcagcgatctgtctatttcgttcatccatagttgcctgactccccgtcgtgtagataactacgatacgggagggcttaccatctggccccagtgctgcaatgataccgcgagacccacgctcaccggctccagatttatcagcaataaaccagccagccggaagggccgagcgcagaagtggtcctgcaactttatccgcctccatccagtctattaattgttgccgggaagctagagtaagtagttcgccagttaatagtttgcgcaacgttgttgccattgctacaggcatcgtggtgtcacgctcgtcgtttggtatggcttcattcagctccggttcccaacgatcaaggcgagttacatgatcccccatgttgtgcaaaaaagcggttagctccttcggtcctccgatcgttgtcagaagtaagttggccgcagtgttatcactcatggttatggcagcactgcataattctcttactgtcatgccatccgtaagatgcttttctgtgactggtgagtactcaaccaagtcattctgagaatagtgtatgcggcgaccgagttgctcttgcccggcgtcaatacgggataataccgcgccacatagcagaactttaaaagtgctcatcattggaaaacgttcttcggggcgaaaactctcaaggatcttaccgctgttgagatccagttcgatgtaacccactcgtgcacccaactgatcttcagcatcttttactttcaccagcgtttctgggtgagcaaaaacaggaaggcaaaatgccgcaaaaaagggaataagggcgacacggaaatgttgaatactcatactcttcctttttcaatattattgaagcatttatcagggttattgtctcatgagcggatacatatttgaatgtatttagaaaaataaacaaataggggttccgcgcacatttccccgaaaagtgccacctgacgtcgacggatcgggagatctcccgatcccctatggtgcactctcagtacaatctgctctgatgccgcatagttaagccagtatctgctccctgcttgtgtgttggaggtcgctgagtagtgcgcgagcaaaatttaagctacaacaaggcaaggcttgaccgacaattgcatgaagaatctgcttagggttaggcgttttgcgctgcttcgcgatgtacgggccagatatacgcgttgacattgattattgactagttattaatagtaatcaattacggggtcattagttcatagcccatatatggagttccgcgttacataacttacggtaaatggcccgcctggctgaccgcccaacgacccccgcccattgacgtcaataatgacgtatgttcccatagtaacgccaatagggactttccattgacgtcaatgggtggagtatttacggtaaactgcccacttggcagtacatcaagtgtatcatatgccaagtacgccccctattgacgtcaatgacggtaaatggcccgcctggcattatgcccagtacatgaccttatgggactttcctacttggcagtacatctacgtattagtcatcgctattaccatggtgatgcggttttggcagtacatcaatgggcgtggatagcggtttgactcacggggatttccaagtctccaccccattgacgtcaatgggagtttgttttggcaccaaaatcaacgggactttccaaaatgtcgtaacaactccgccccattgacgcaaatgggcggtaggcgtgtacggtgggaggtctatataagcagcgcgttttgcct

SEQ ID NO: 25 - DNA, 9905 bp, synthetic construct
  misc_feature 1..9905: note = Synthetic: RMP5 MND
  source 1..9905: mol_type = other DNA
gtactgggtctctctggttagaccagatctgagcctgggagctctctggctaactagggaacccactgcttaagcctcaataaagcttgccttgagtgcttcaagtagtgtgtgcccgtctgttgtgtgactctggtaactagagatccctcagacccttttagtcagtgtggaaaatctctagcagtggcgcccgaacagggacttgaaagcgaaagggaaaccagaggagctctctcgacgcaggactcggcttgctgaagcgcgcacggcaagaggcgaggggcggcgactggtgagtacgccaaaaattttgactagcggaggctagaaggagagagatgggtgcgagagcgtcagtattaagcgggggagaattagatcgcgatgggaaaaaattcggttaaggccagggggaaagaaaaaatataaattaaaacatatagtatgggcaagcagggagctagaacgattcgcagttaatcctggcctgttagaaacatcagaaggctgtagacaaatactgggacagctacaaccatcccttcagacaggatcagaagaacttagatcattatataatacagtagcaaccctctattgtgtgcatcaaaggatagagataaaagacaccaaggaagctttagacaagatagaggaagagcaaaacaaaagtaagaccaccgcacagcaagcggccgctgatcttcagacctggaggaggagatatgagggacaattggagaagtgaattatataaatataaagtagtaaaaattgaaccattaggagtagcacccaccaaggcaaagagaagagtggtgcagagagaaaaaagagcagtgggaataggagctttgttccttgggttcttgggagcagcaggaagcactatgggcgcagcgtcaatgacgctgacggtacaggccagacaattattgtctggtatagtgcagcagcagaacaatttgctgagggctattgaggcgcaacagcatctgttgcaactcacagtctggggcatcaagcagctccaggcaagaatcctggctgtggaaagatacctaaaggatcaacagctcctggggatttggggttgctctggaaaactcatttgcaccactgctgtgccttggaatgctagttggagtaataaatctctggaacagatttggaatcacacgacctggatggagtgggacagagaaattaacaattacacaagcttaatacactccttaattgaagaatcgcaaaaccagcaagaaaagaatgaacaagaattattggaattagataaatgggcaagtttgtggaattggtttaacataacaaattggctgtggtatataaaattattcataatgatagtaggaggcttggtaggtttaagaatagtttttgctgtactttctatagtgaatagagttaggcagggatattcaccattatcgtttcagacccacctcccaaccccgaggggacccgacaggcccgaaggaatagaagaagaaggtggagagagagacagagacagatccattcgattagtgaacggatcggcactgcgtgcgccaattctgcagacaaatggcagtattcatccacaattttaaaagaaaaggggggattggggggtacagtgcaggggaaagaatagtagacataatagcaacagacatacaaactaaagaattacaaaaacaaattacaaaaattcaaaattttcgggtttattacagggacagcagagatccagtttggttaattctagacagttaacatctcgagccataaagatggttaattaagaacagagagacagcagaatatgggccaaacaggatatctgtggtaagcagttcctgccccggctcagggccaagaacagttggaacagcagaatatgggccaaacaggatatctgtggtaagcagttcctgccccggctcagggccaagaacagatggtccccagatgcggtcccgccctcagcagtttctagagaaccatcagatgtttccagggtgccccaaggacctgaaatgaccctgtgccttatttgaactaaccaatcagttcgcttctcgcttctgttcgcgcgcttctgctccccgagctctatataagcagagctcgtttagtgaaccgtcagatccgtacgttcgaagctagcatgatttcacccttcctggttttggcaattggaacctgccttaccaactcccttgtccctgaaaaggagaaggaccccaaatattggagagaccaggctcaggaaaccctcaagtacgctcttgaactgcaaaagcttaatactaacgtggctaaaaacgtgataatgttcttgggggacggaatgggggtttcaaccgttaccgcggccagaatcttgaaagggcagctgcaccataacccaggcgaagaaacgaggctggagatggacaaatttccattcgtggcgctttctaagacctacaacactaacgcccaggtccctgactcagctggtacggccactgcctacctttgtggagtgaaggcaaatgaggggactgttggtgtttccgcagctactgagagatctcggtgtaatacgactcaaggtaatgaagttacatccatactccgatgggcaaaagacgcgggcaaatctgttgggattgttacaactactagggtgaaccatgcgacaccctctgcagcttatgcgcacagtgccgaccgagactggtattcagataatgagatgccacccgaggcccttagccagggctgcaaggacatagcctatcaattgatgcacaatatcagagacatagacgttataatgggtggtggtcgcaagtacatgtaccccaaaaacaaaaccgacgtagagtatgaatccgatgaaaaagctaggggcaccagactcgacggacttgatctggttgatacatggaaatcctttaaacctcggtataagcattcacatttcatctggaacaggaccgaacttctcacattggacccccacaatgttgactatctcctcggtttgtttgaaccaggggatatgcagtatgagctcaatcggaacaacgtcactgaccccagtttgagtgaaatggtcgttgttgcaatacaaattttgaggaaaaatccaaaggggtttttcttgttggtagagggcggacggatagatcacgggcaccacgaaggcaaagcaaaacaggccctgcacgaagccgttgaaatggatcgcgctatcggtcaagccggctccctgacgagtagtgaagataccttgaccgtcgtcactgcggatcatagccacgtttttacctttgggggatacacccccaggggcaactcaatttttggacttgcaccgatgctcagcgacacagataaaaagccttttactgcgattctgtatggcaacggccctggatacaaagtagtagggggtgaaagggaaaacgtcagcatggtggactatgcacacaataattatcaggcgcagtccgctgttccgctgcggcatgagactcacgggggagaggacgttgctgtcttttccaagggaccaatggctcatcttctccatggagtccatgagcaaaattatgtccctcatgtcatggcatacgctgcatgtataggagcaaatctcgggcactgtgcaccggcgtcctccgattccagcgacagttcagacagctctgacagctccgattcctccgactcaagttgagaattcgatatcaagcttatcgataatcaacctctggattacaaaatttgtgaaagattgactggtattcttaactatgttgctccttttacgctatgtggatacgctgctttaatgcctttgtatcatgctattgcttcccgtatggctttcattttctcctccttgtataaatcctggttgctgtctctttatgaggagttgtggcccgttgtcaggcaacgtggcgtggtgtgcactgtgtttgctgacgcaacccccactggttggggcattgccaccacctgtcagctcctttccgggactttcgctttccccctccctattgccacggcggaactcatcgccgcctgccttgcccgctgctggacaggggctcggctgttgggcactgacaattccgtggtgttgtcggggaaatcatcgtcctttccttggctgctcgcctgtgttgccacctggattctgcgcgggacgtccttctgctacgtcccttcggccctcaatccagcggaccttccttcccgcggcctgctgccggctctgcggcctcttccgcgtcttcgccttcgccctcagacgagtcggatctccctttgggccgcctccccgcatcgataccgtcgacctcgatcgagacctagaaaaacatggagcaatcacaagtagcaatacagcagctaccaatgctgattgtgcctggctagaagcacaagaggaggaggaggtgggttttccagtcacacctcaggtacctttaagaccaatgacttacaaggcagctgtagatcttagccactttttaaaagaaaaggggggactggaagggctaattcactcccaacgaagacaagatatccttgatctgtggatctaccacacacaaggctacttccctgattggcagaactacacaccagggccagggatcagatatccactgacctttggatggtgctacaagctagtaccagttgagcaagagaaggtagaagaagccaatgaaggagagaacacccgcttgttacaccctgtgagcctgcatgggatggatgacccggagagagaagtattagagtggaggtttgacagccgcctagcatttcatcacatggcccgagagctgcatccggactgtactgggtctctctggttagaccagatctgagcctgggagctctctggctaactagggaacccactgcttaagcctcaataaagcttgccttgagtgcttcaagtagtgtgtgcccgtctgttgtgtgactctggtaactagagatccctcagacccttttagtcagtgtggaaaatctctagcagggcccgtttaaacccgctgatcagcctcgactgtgccttctagttgccagccatctgttgtttgcccctcccccgtgccttccttgaccctggaaggtgccactcccactgtcctttcctaataaaatgaggaaattgcatcgcattgtctgagtaggtgtcattctattctggggggtggggtggggcaggacagcaagggggaggattgggaagacaatagcaggcatgctggggatgcggtgggctctatggcttctgaggcggaaagaaccagctggggctctagggggtatccccacgcgccctgtagcggcgcattaagcgcggcgggtgtggtggttacgcgcagcgtgaccgctacacttgccagcgccctagcgcccgctcctttcgctttcttcccttcctttctcgccacgttcgccggctttccccgtcaagctctaaatcgggggctccctttagggttccgatttagtgctttacggcacctcgaccccaaaaaacttgattagggtgatggttcacgtagtgggccatcgccctgatagacggtttttcgccctttgacgttggagtccacgttctttaatagtggactcttgttccaaactggaacaacactcaaccctatctcggtctattcttttgatttataagggattttgccgatttcggcctattggttaaaaaatgagctgatttaacaaaaatttaacgcgaattaattctgtggaatgtgtgtcagttagggtgtggaaagtccccaggctccccagcaggcagaagtatgcaaagcatgcatctcaattagtcagcaaccaggtgtggaaagtccccaggctccccagcaggcagaagtatgcaaagcatgcatctcaattagtcagcaaccatagtcccgcccctaactccgcccatcccgcccctaactccgcccagttccgcccattctccgccccatggctgactaattttttttatttatgcagaggccgaggccgcctctgcctctgagctattccagaagtagtgaggaggcttttttggaggcctaggcttttgcaaaaagctcccgggagcttgtatatccattttcggatctgatcagcacgtgttgacaattaatcatcggcatagtatatcggcatagtataatacgacaaggtgaggaactaaaccatggccaagttgaccagtgccgttccggtgctcaccgcgcgcgacgtcgccggagcggtcgagttctggaccgaccggctcgggttctcccgggacttcgtggaggacgacttcgccggtgtggtccgggacgacgtgaccctgttcatcagcgcggtccaggaccaggtggtgccggacaacaccctggcctgggtgtgggtgcgcggcctggacgagctgtacgccgagtggtcggaggtcgtgtccacgaacttccgggacgcctccgggccggccatgaccgagatcggcgagcagccgtgggggcgggagttcgccctgcgcgacccggccggcaactgcgtgcacttcgtggccgaggagcaggactgacacgtgctacgagatttcgattccaccgccgccttctatgaaaggttgggcttcggaatcgttttccgggacgccggctggatgatcctccagcgcggggatctcatgctggagttcttcgcccaccccaacttgtttattgcagcttataatggttacaaataaagcaatagcatcacaaatttcacaaataaagcatttttttcactgcattctagttgtggtttgtccaaactcatcaatgtatcttatcatgtctgtataccgtcgacctctagctagagcttggcgtaatcatggtcatagctgtttcctgtgtgaaattgttatccgctcacaattccacacaacatacgagccggaagcataaagtgtaaagcctggggtgcctaatgagtgagctaactcacattaattgcgttgcgctcactgcccgctttccagtcgggaaacctgtcgtgccagctgcattaatgaatcggccaacgcgcggggagaggcggtttgcgtattgggcgctcttccgcttcctcgctcactgactcgctgcgctcggtcgttcggctgcggcgagcggtatcagctcactcaaaggcggtaatacggttatccacagaatcaggggataacgcaggaaagaacatgtgagcaaaaggccagcaaaaggccaggaaccgtaaaaaggccgcgttgctggcgtttttccataggctccgcccccctgacgagcatcacaaaaatcgacgctcaagtcagaggtggcgaaacccgacaggactataaagataccaggcgtttccccctggaagctccctcgtgcgctctcctgttccgaccctgccgcttaccggatacctgtccgcctttctcccttcgggaagcgtggcgctttctcatagctcacgctgtaggtatctcagttcggtgtaggtcgttcgctccaagctgggctgtgtgcacgaaccccccgttcagcccgaccgctgcgccttatccggtaactatcgtcttgagtccaacccggtaagacacgacttatcgccactggcagcagccactggtaacaggattagcagagcgaggtatgtaggcggtgctacagagttcttgaagtggtggcctaactacggctacactagaagaacagtatttggtatctgcgctctgctgaagccagttaccttcggaaaaagagttggtagctcttgatccggcaaacaaaccaccgctggtagcggtggtttttttgtttgcaagcagcagattacgcgcagaaaaaaaggatctcaagaagatcctttgatcttttctacggggtctgacgctcagtggaacgaaaactcacgttaagggattttggtcatgagattatcaaaaaggatcttcacctagatccttttaaattaaaaatgaagttttaaatcaatctaaagtatatatgagtaaacttggtctgacagttaccaatgcttaatcagtgaggcacctatctcagcgatctgtctatttcgttcatccatagttgcctgactccccgtcgtgtagataactacgatacgggagggcttaccatctggccccagtgctgcaatgataccgcgagacccacgctcaccggctccagatttatcagcaataaaccagccagccggaagggccgagcgcagaagtggtcctgcaactttatccgcctccatccagtctattaattgttgccgggaagctagagtaagtagttcgccagttaatagtttgcgcaacgttgttgccattgctacaggcatcgtggtgtcacgctcgtcgtttggtatggcttcattcagctccggttcccaacgatcaaggcgagttacatgatcccccatgttgtgcaaaaaagcggttagctccttcggtcctccgatcgttgtcagaagtaagttggccgcagtgttatcactcatggttatggcagcactgcataattctcttactgtcatgccatccgtaagatgcttttctgtgactggtgagtactcaaccaagtcattctgagaatagtgtatgcggcgaccgagttgctcttgcccggcgtcaatacgggataataccgcgccacatagcagaactttaaaagtgctcatcattggaaaacgttcttcggggcgaaaactctcaaggatcttaccgctgttgagatccagttcgatgtaacccactcgtgcacccaactgatcttcagcatcttttactttcaccagcgtttctgggtgagcaaaaacaggaaggcaaaatgccgcaaaaaagggaataagggcgacacggaaatgttgaatactcatactcttcctttttcaatattattgaagcatttatcagggttattgtctcatgagcggatacatatttgaatgtatttagaaaaataaacaaataggggttccgcgcacatttccccgaaaagtgccacctgacgtcgacggatcgggagatctcccgatcccctatggtgcactctcagtacaatctgctctgatgccgcatagttaagccagtatctgctccctgcttgtgtgttggaggtcgctgagtagtgcgcgagcaaaatttaagctacaacaaggcaaggcttgaccgacaattgcatgaagaatctgcttagggttaggcgttttgcgctgcttcgcgatgtacgggccagatatacgcgttgacattgattattgactagttattaatagtaatcaattacggggtcattagttcatagcccatatatggagttccgcgttacataacttacggtaaatggcccgcctggctgaccgcccaacgacccccgcccattgacgtcaataatgacgtatgttcccatagtaacgccaatagggactttccattgacgtcaatgggtggagtatttacggtaaactgcccacttggcagtacatcaagtgtatcatatgccaagtacgccccctattgacgtcaatgacggtaaatggcccgcctggcattatgcccagtacatgaccttatgggactttcctacttggcagtacatctacgtattagtcatcgctattaccatggtgatgcggttttggcagtacatcaatgggcgtggatagcggtttgactcacggggatttccaagtctccaccccattgacgtcaatgggagtttgttttggcaccaaaatcaacgggactttccaaaatgtcgtaacaactccgccccattgacgcaaatgggcggtaggcgtgtacggtgggaggtctatataagcagcgcgttttgcct

SEQ ID NO: 26 - DNA, 10574 bp, synthetic construct
  misc_feature 1..10574: note = Synthetic: RMP5 MND Fc
  source 1..10574: mol_type = other DNA
gtactgggtctctctggttagaccagatctgagcctgggagctctctggctaactagggaacccactgcttaagcctcaataaagcttgccttgagtgcttcaagtagtgtgtgcccgtctgttgtgtgactctggtaactagagatccctcagacccttttagtcagtgtggaaaatctctagcagtggcgcccgaacagggacttgaaagcgaaagggaaaccagaggagctctctcgacgcaggactcggcttgctgaagcgcgcacggcaagaggcgaggggcggcgactggtgagtacgccaaaaattttgactagcggaggctagaaggagagagatgggtgcgagagcgtcagtattaagcgggggagaattagatcgcgatgggaaaaaattcggttaaggccagggggaaagaaaaaatataaattaaaacatatagtatgggcaagcagggagctagaacgattcgcagttaatcctggcctgttagaaacatcagaaggctgtagacaaatactgggacagctacaaccatcccttcagacaggatcagaagaacttagatcattatataatacagtagcaaccctctattgtgtgcatcaaaggatagagataaaagacaccaaggaagctttagacaagatagaggaagagcaaaacaaaagtaagaccaccgcacagcaagcggccgctgatcttcagacctggaggaggagatatgagggacaattggagaagtgaattatataaatataaagtagtaaaaattgaaccattaggagtagcacccaccaaggcaaagagaagagtggtgcagagagaaaaaagagcagtgggaataggagctttgttccttgggttcttgggagcagcaggaagcactatgggcgcagcgtcaatgacgctgacggtacaggccagacaattattgtctggtatagtgcagcagcagaacaatttgctgagggctattgaggcgcaacagcatctgttgcaactcacagtctggggcatcaagcagctccaggcaagaatcctggctgtggaaagatacctaaaggatcaacagctcctggggatttggggttgctctggaaaactcatttgcaccactgctgtgccttggaatgctagttggagtaataaatctctggaacagatttggaatcacacgacctggatggagtgggacagagaaattaacaattacacaagcttaatacactccttaattgaagaatcgcaaaaccagcaagaaaagaatgaacaagaattattggaattagataaatgggcaagtttgtggaattggtttaacataacaaattggctgtggtatataaaattattcataatgatagtaggaggcttggtaggtttaagaatagtttttgctgtactttctatagtgaatagagttaggcagggatattcaccattatcgtttcagacccacctcccaaccccgaggggacccgacaggcccgaaggaatagaagaagaaggtggagagagagacagagacagatccattcgattagtgaacggatcggcactgcgtgcgccaattctgcagacaaatggcagtattcatccacaattttaaaagaaaaggggggattggggggtacagtgcaggggaaagaatagtagacataatagcaacagacatacaaactaaagaattacaaaaacaaattacaaaaattcaaaattttcgggtttattacagggacagcagagatccagtttggttaattctagacagttaacatctcgagccataaagatggttaattaagaacagagagacagcagaatatgggccaaacaggatatctgtggtaagcagttcctgccccggctcagggccaagaacagttggaacagcagaatatgggccaaacaggatatctgtggtaagcagttcctgccccggctcagggccaagaacagatggtccccagatgcggtcccgccctcagcagtttctagagaaccatcagatgtttccagggtgccccaaggacctgaaatgaccctgtgccttatttgaactaaccaatcagttcgcttctcgcttctgttcgcgcgcttctgctccccgagctctatataagcagagctcgtttagtgaaccgtcagatccgtacgttcgaagctagcatgataagtcccttcctcgtccttgccataggtacctgtctcaccaattcacttgtgccggagaaggaaaaagacccgaagtactggagggaccaggcccaggagacactcaagtatgctttggagctgcagaagctcaacaccaatgtcgccaaaaacgtgataatgttcctcggtgacggcatgggggtatctactgtaacggcggcacgcatcctgaaaggacagctgcaccacaatccaggcgaggagacccggctggaaatggacaagtttccattcgtggctttgtccaaaacttacaacaccaacgcacaagttcctgattctgccggtacggccactgcctacctctgtggcgtcaaggcaaatgaggggactgtgggggtatctgcggcaactgagaggagccgatgcaacacgacgcagggtaacgaggtgacatctatcctgaggtgggcaaaggacgcgggaaaaagcgtcggaatagtaacgaccacaagggtaaaccacgctacccctagcgcagcgtatgcacattcagccgatcgggattggtacagtgacaatgaaatgccgcctgaagctctgtcccagggttgcaaagatatcgcctatcagctgatgcataatatccgcgatattgacgtaatcatggggggtggacgaaaatatatgtacccaaaaaataaaacagatgtagaatatgaatctgatgagaaggcccggggtacaaggcttgatggtctcgatcttgtcgacacgtggaaatcattcaaacctcggtataaacacagccattttatctggaataggactgaattgcttacgcttgatccacacaacgtagactatttgctgggcctttttgagccgggagatatgcagtacgaacttaaccggaacaatgtgactgacccttctcttagcgagatggtggtagtggcgattcagatactcagaaaaaatcccaagggtttttttctcctggtcgagggcggaagaatcgatcatggacatcacgaaggaaaagcgaagcaagcacttcatgaagccgtagagatggatagggcaataggtcaggcaggctcacttacgtcaagtgaagatacccttacggtggtgacagctgaccacagccacgtctttactttcggcggctataccccccgaggcaattcaatctttgggttggcgcccatgctttcagatactgataagaaaccttttacagccatcttgtatggtaatgggcctgggtataaggtagttggtggtgagagggagaatgtatcaatggtcgattacgcacataataactaccaagctcagtcagcagtacctctgaggcatgaaacacacggcggagaggacgtagcagtattttcaaaaggcccaatggcccatctgctgcatggggtacatgagcaaaattatgtgccccatgtgatggcatatgcagcctgcatcggagcaaatctcgggcactgtgctcccgcctcaagtctcaaagacaaaacacacacttgtccaccttgcccggcacctgaacttctgggcggcccgagcgtttttttgttccctcctaaacctaaggacacgctcatgatcagccgcacgccagaggttacctgtgtagtggtggatgtcagccacgaggatccggaagtaaaattcaactggtatgtagatggggtggaggttcacaatgccaaaaccaagccacgagaggaacagtacaatagtacttaccgggtcgtgtctgtattgaccgtcctgcatcaggattggttgaacgggaaagaatataagtgcaaggtgagcaacaaagcacttccggccccaatagagaaaacaattagtaaagcaaaaggacaaccacgggaaccgcaagtttatacactgccgccctctcgagacgagctgaccaaaaatcaggttagccttacatgtttggtcaaggggttctacccgagtgatattgcagtggaatgggaatccaacggtcaaccagaaaataactacaaaactactccgccggtgttggattcagacggctctttctttctgtatagcaaactcactgttgacaagtcaagatggcagcagggcaatgtatttagctgtagtgttatgcacgaagctcttcataaccactacacacaaaagtcactttctctttccccaggaaaagacatcgatgacgatgacgatgatgacgacgacgattgagaattcgatatcaagcttatcgataatcaacctctggattacaaaatttgtgaaagattgactggtattcttaactatgttgctccttttacgctatgtggatacgctgctttaatgcctttgtatcatgctattgcttcccgtatggctttcattttctcctccttgtataaatcctggttgctgtctctttatgaggagttgtggcccgttgtcaggcaacgtggcgtggtgtgcactgtgtttgctgacgcaacccccactggttggggcattgccaccacctgtcagctcctttccgggactttcgctttccccctccctattgccacggcggaactcatcgccgcctgccttgcccgctgctggacaggggctcggctgttgggcactgacaattccgtggtgttgtcggggaaatcatcgtcctttccttggctgctcgcctgtgttgccacctggattctgcgcgggacgtccttctgctacgtcccttcggccctcaatccagcggaccttccttcccgcggcctgctgccggctctgcggcctcttccgcgtcttcgccttcgccctcagacgagtcggatctccctttgggccgcctccccgcatcgataccgtcgacctcgatcgagacctagaaaaacatggagcaatcacaagtagcaatacagcagctaccaatgctgattgtgcctggctagaagcacaagaggaggaggaggtgggttttccagtcacacctcaggtacctttaagaccaatgacttacaaggcagctgtagatcttagccactttttaaaagaaaaggggggactggaagggctaattcactcccaacgaagacaagatatccttgatctgtggatctaccacacacaaggctacttccctgattggcagaactacacaccagggccagggatcagatatccactgacctttggatggtgctacaagctagtaccagttgagcaagagaaggtagaagaagccaatgaaggagagaacacccgcttgttacaccctgtgagcctgcatgggatggatgacccggagagagaagtattagagtggaggtttgacagccgcctagcatttcatcacatggcccgagagctgcatccggactgtactgggtctctctggttagaccagatctgagcctgggagctctctggctaactagggaacccactgcttaagcctcaataaagcttgccttgagtgcttcaagtagtgtgtgcccgtctgttgtgtgactctggtaactagagatccctcagacccttttagtcagtgtggaaaatctctagcagggcccgtttaaacccgctgatcagcctcgactgtgccttctagttgccagccatctgttgtttgcccctcccccgtgccttccttgaccctggaaggtgccactcccactgtcctttcctaataaaatgaggaaattgcatcgcattgtctgagtaggtgtcattctattctggggggtggggtggggcaggacagcaagggggaggattgggaagacaatagcaggcatgctggggatgcggtgggctctatggcttctgaggcggaaagaaccagctggggctctagggggtatccccacgcgccctgtagcggcgcattaagcgcggcgggtgtggtggttacgcgcagcgtgaccgctacacttgccagcgccctagcgcccgctcctttcgctttcttcccttcctttctcgccacgttcgccggctttccccgtcaagctctaaatcgggggctccctttagggttccgatttagtgctttacggcacctcgaccccaaaaaacttgattagggtgatggttcacgtagtgggccatcgccctgatagacggtttttcgccctttgacgttggagtccacgttctttaatagtggactcttgttccaaactggaacaacactcaaccctatctcggtctattcttttgatttataagggattttgccgatttcggcctattggttaaaaaatgagctgatttaacaaaaatttaacgcgaattaattctgtggaatgtgtgtcagttagggtgtggaaagtccccaggctccccagcaggcagaagtatgcaaagcatgcatctcaattagtcagcaaccaggtgtggaaagtccccaggctccccagcaggcagaagtatgcaaagcatgcatctcaattagtcagcaaccatagtcccgcccctaactccgcccatcccgcccctaactccgcccagttccgcccattctccgccccatggctgactaattttttttatttatgcagaggccgaggccgcctctgcctctgagctattccagaagtagtgaggaggcttttttggaggcctaggcttttgcaaaaagctcccgggagcttgtatatccattttcggatctgatcagcacgtgttgacaattaatcatcggcatagtatatcggcatagtataatacgacaaggtgaggaactaaaccatggccaagttgaccagtgccgttccggtgctcaccgcgcgcgacgtcgccggagcggtcgagttctggaccgaccggctcgggttctcccgggacttcgtggaggacgacttcgccggtgtggtccgggacgacgtgaccctgttcatcagcgcggtccaggaccaggtggtgccggacaacaccctggcctgggtgtgggtgcgcggcctggacgagctgtacgccgagtggtcggaggtcgtgtccacgaacttccgggacgcctccgggccggccatgaccgagatcggcgagcagccgtgggggcgggagttcgccctgcgcgacccggccggcaactgcgtgcacttcgtggccgaggagcaggactgacacgtgctacgagatttcgattccaccgccgccttctatgaaaggttgggcttcggaatcgttttccgggacgccggctggatgatcctccagcgcggggatctcatgctggagttcttcgcccaccccaacttgtttattgcagcttataatggttacaaataaagcaatagcatcacaaatttcacaaataaagcatttttttcactgcattctagttgtggtttgtccaaactcatcaatgtatcttatcatgtctgtataccgtcgacctctagctagagcttggcgtaatcatggtcatagctgtttcctgtgtgaaattgttatccgctcacaattccacacaacatacgagccggaagcataaagtgtaaagcctggggtgcctaatgagtgagctaactcacattaattgcgttgcgctcactgcccgctttccagtcgggaaacctgtcgtgccagctgcattaatgaatcggccaacgcgcggggagaggcggtttgcgtattgggcgctcttccgcttcctcgctcactgactcgctgcgctcggtcgttcggctgcggcgagcggtatcagctcactcaaaggcggtaatacggttatccacagaatcaggggataacgcaggaaagaacatgtgagcaaaaggccagcaaaaggccaggaaccgtaaaaaggccgcgttgctggcgtttttccataggctccgcccccctgacgagcatcacaaaaatcgacgctcaagtcagaggtggcgaaacccgacaggactataaagataccaggcgtttccccctggaagctccctcgtgcgctctcctgttccgaccctgccgcttaccggatacctgtccgcctttctcccttcgggaagcgtggcgctttctcatagctcacgctgtaggtatctcagttcggtgtaggtcgttcgctccaagctgggctgtgtgcacgaaccccccgttcagcccgaccgctgcgccttatccggtaactatcgtcttgagtccaacccggtaagacacgacttatcgccactggcagcagccactggtaacaggattagcagagcgaggtatgtaggcggtgctacagagttcttgaagtggtggcctaactacggctacactagaagaacagtatttggtatctgcgctctgctgaagccagttaccttcggaaaaagagttggtagctcttgatccggcaaacaaaccaccgctggtagcggtggtttttttgtttgcaagcagcagattacgcgcagaaaaaaaggatctcaagaagatcctttgatcttttctacggggtctgacgctcagtggaacgaaaactcacgttaagggattttggtcatgagattatcaaaaaggatcttcacctagatccttttaaattaaaaatgaagttttaaatcaatctaaagtatatatgagtaaacttggtctgacagttaccaatgcttaatcagtgaggcacctatctcagcgatctgtctatttcgttcatccatagttgcctgactccccgtcgtgtagataactacgatacgggagggcttaccatctggccccagtgctgcaatgataccgcgagacccacgctcaccggctccagatttatcagcaataaaccagccagccggaagggccgagcgcagaagtggtcctgcaactttatccgcctccatccagtctattaattgttgccgggaagctagagtaagtagttcgccagttaatagtttgcgcaacgttgttgccattgctacaggcatcgtggtgtcacgctcgtcgtttggtatggcttcattcagctccggttcccaacgatcaaggcgagttacatgatcccccatgttgtgcaaaaaagcggttagctccttcggtcctccgatcgttgtcagaagtaagttggccgcagtgttatcactcatggttatggcagcactgcataattctcttactgtcatgccatccgtaagatgcttttctgtgactggtgagtactcaaccaagtcattctgagaatagtgtatgcggcgaccgagttgctcttgcccggcgtcaatacgggataataccgcgccacatagcagaactttaaaagtgctcatcattggaaaacgttcttcggggcgaaaactctcaaggatcttaccgctgttgagatccagttcgatgtaacccactcgtgcacccaactgatcttcagcatcttttactttcaccagcgtttctgggtgagcaaaaacaggaaggcaaaatgccgcaaaaaagggaataagggcgacacggaaatgttgaatactcatactcttcctttttcaatattattgaagcatttatcagggttattgtctcatgagcggatacatatttgaatgtatttagaaaaataaacaaataggggttccgcgcacatttccccgaaaagtgccacctgacgtcgacggatcgggagatctcccgatcccctatggtgcactctcagtacaatctgctctgatgccgcatagttaagccagtatctgctccctgcttgtgtgttggaggtcgctgagtagtgcgcgagcaaaatttaagctacaacaaggcaaggcttgaccgacaattgcatgaagaatctgcttagggttaggcgttttgcgctgcttcgcgatgtacgggccagatatacgcgttgacattgattattgactagttattaatagtaatcaattacggggtcattagttcatagcccatatatggagttccgcgttacataacttacggtaaatggcccgcctggctgaccgcccaacgacccccgcccattgacgtcaataatgacgtatgttcccatagtaacgccaatagggactttccattgacgtcaatgggtggagtatttacggtaaactgcccacttggcagtacatcaagtgtatcatatgccaagtacgccccctattgacgtcaatgacggtaaatggcccgcctggcattatgcccagtacatgaccttatgggactttcctacttggcagtacatctacgtattagtcatcgctattaccatggtgatgcggttttggcagtacatcaatgggcgtggatagcggtttgactcacggggatttccaagtctccaccccattgacgtcaatgggagtttgttttggcaccaaaatcaacgggactttccaaaatgtcgtaacaactccgccccattgacgcaaatgggcggtaggcgtgtacggtgggaggtctatataagcagcgcgttttgcct

SEQ ID NO: 27 - protein, 524 aa, Homo sapiens [sequence omitted]

SEQ ID NO: 28 - protein, 524 aa, Homo sapiens [sequence omitted]

SEQ ID NO: 29 - protein, 524 aa, Homo sapiens
  SITE 1..524: note = >AKI72035.1 ALPL, partial [synthetic construct]
MISPFLVLAIGTCLTNSLVPEKEKDPKYWRDQAQETLKYALELQKLNTNVAKNVIMFLGDGMGVSTVTAARILKGQLHHNPGEETRLEMDKFPFVALSKTYNTNAQVPDSAGTATAYLCGVKANEGTVGVSAATERSRCNTTQGNEVTSILRWAKDAGKSVGIVTTTRVNHATPSAAYAHSADRDWYSDNEMPPEALSQGCKDIAYQLMHNIRDIDVIMGGGRKYMYPKNKTDVEYESDEKARGTRLDGLDLVDTWKSFKPRHKHSHFIWNRTELLTLDPHNVDYLLGLFEPGDMQYELNRNNVTDPSLSEMVVVAIQILRKNPKGFFLLVEGGRIDHGHHEGKAKQALHEAVEMDRAIGQAGSLTSSEDTLTVVTVDHSHVFTFGGYTPRGNSIFGLAPMLSDTDKKPFTAILYGNGPGYKVVGGERENVSMVDYAHNNYQAQSAVPLRHETHGGEDVAVFSKGPMAHLLHGVHEQNYVPHVMAYAACIGANLGHCAPASSAGSLAAGPLLLALALYPLSVLF

SEQ ID NO: 30 - protein, 524 aa, Homo sapiens [sequence omitted]

SEQ ID NO: 31 - protein, 602 aa, Homo sapiens
  SITE 1..602: note = >BAD93051.1 ALPL protein variant, partial [Homo sapiens]
AAFIRRRGWWPGPRCAPATPRPLSWLRAPTRLCLDGPSPVLCAGLEHQLTSDHCQPTPSHPRRLHLWAPGIKQVLGCTMISPFLVLAIGTCLTNSLVPEKEKDPKYWRDQAQETLKYALELQKLNTNVAKNVIMFLGDGMGVSTVTAARILKGQLHHNPGEETRLEMDKFPFVALSKTYNTNAQVPDSAGTATAYLCGVKANEGTVGVSAATERSRCNTTQGNEVTSILHWAKDAGKSVGIVTTTRVNHATPSAAYAHSADRDWYSDNEMPPEALSQGCKDIAYQLMHNIRDIDVIMGGGRKYMYPKNKTDVEYESDEKARGTRLDGLDLVDTWKSFKPRYKHSHFIWNRTELLTLDPHNVDYLLGLFEPGDMQYELNRNNVTDPSLSEMVVVAIQILRKNPKGFFLLVEGGRIDHGHHEGKAKQALHEAVEMDRAIGQAGSLTSSEDTLTVVTADHSHVFTFGGYTPRGNSIFGLAPMLSDTDKKPFTAILYGNGPGYKVVGGERENVSMVDYAHNNYQAQSAVPLRHETHGGEDVAVFSKGPMAHLLHGVHEQNYVPHVMAYAACIGANLGHCAPASSAGSLAAGPLLLALALYPLSVLF

SEQ ID NO: 32 - protein, 532 aa, synthetic construct
  REGION 1..532: note = Synthetic
MKQVLGCTMISPFLVLAIGTCLTSSLVPEKEKDPKYWRDQAQETLKYALELQKLNTNVAKNVIMFLGDGMGVSTVTAARILKGQLHHNPGEETRLEMDKFPFVALSKTYNTNAQVPDSAGTATAYLCGVKANEGTVGVSAATERSRCNTTQGNEVTSILRWAKDAGKSVGIVTTTRVNHATPSAAYAHSADRDWYSDNEMPPEALSQGCKDIAYQLMHNIRDIDVIMGGGRKYMYPKNKTDVEYEIDEKARGTRLDGLDLVDTWKSFKPRHKHSHFIWNRTELLTLDPHNVDYLLGLFEPGDMQYELNRNNVTDPSLSEMVVVAIQILRKNPKGFFLLVEGGRIDHGHHEGKAKQALHEAVEMDRAIGQAGSMTSSEDTLTVVTADHSHVFTFGGYTPRGNSIFGLAPMLSDTDKKPFTAILYGNGPGYKVVGGERENVSMVDYAHNNYQAQSAVPLRHETHGGEDVAVFSKGPMAHLLHGVHEQNYIPHVMAYAACIGANLDHCAPASSAGSLAAGPLLLALALFPLSILF

SEQ ID NO: 33 - protein, 19 aa, Mus musculus
  SITE 1..19: note = Secretion Signal peptide 1 IgG2H
MGWSCIILFLVATATGVHS

SEQ ID NO: 34 - protein, 22 aa, synthetic construct
  REGION 1..22: note = Synthetic: Secretion Signal peptide 2 huIgKVIII Ig kappa light chain V-III region
MDMRVPAQLLGLLLLWLRGARC

SEQ ID NO: 35 - protein, 24 aa, synthetic construct
  REGION 1..24: note = Synthetic: Secretion Signal peptide 3 huIgKVIII-AA
MDMRVPAQLLGLLLLWLRGARCAA

SEQ ID NO: 36 - protein, 23 aa, Homo sapiens
  SITE 1..23: note = Secretion Signal peptide 4 huCD33tPA
MDAMKRGLCCVLLLCGAVFVSPS

SEQ ID NO: 37 - protein, 25 aa, synthetic construct
  REGION 1..25: note = Synthetic: Secretion Signal peptide 5 huCD33tPA-AA
MDAMKRGLCCVLLLCGAVFVSPSAA

SEQ ID NO: 38 - protein, 21 aa, synthetic construct
  REGION 1..21: note = Synthetic: Secretion Signal peptide 6 Secrecon
MWWRLWWLLLLLLLLWPMVWA

SEQ ID NO: 39 - protein, 23 aa, synthetic construct
  REGION 1..23: note = Synthetic: Secretion Signal peptide 7 Secrecon-AA
MWWRLWWLLLLLLLLWPMVWAAA

SEQ ID NO: 40 - protein, 20 aa, Mus musculus
  SITE 1..20: note = Secretion Signal peptide 8 mIgKVIII - Mouse Ig kappa light chain V-III region
METDTLLLWVLLLWVPGSTG

SEQ ID NO: 41 - protein, 22 aa, synthetic construct
  REGION 1..22: note = Synthetic: Secretion Signal peptide 9 mIgKVIII-AA
METDTLLLWVLLLWVPGSTGAA

SEQ ID NO: 42 - protein, 19 aa, Homo sapiens
  SITE 1..19: note = Secretion Signal peptide 10 Alpha-lactalbumin
MMSFVSLLLVGILFHATQA

SEQ ID NO: 43 - protein, 17 aa, Homo sapiens
  SITE 1..17: note = Secretion Signal peptide 11 - SEAP - Native secreted alkaline phosphatase
MLLLLLLLGLRLQLSLG

SEQ ID NO: 44 - protein, 521 aa, synthetic construct
  REGION 1..521: note = Synthetic: RMP-005 with Secretion Signal peptide 1 IgG2H
MGWSCIILFLVATATGVHSVPEKEKDPKYWRDQAQETLKYALELQKLNTNVAKNVIMFLGDGMGVSTVTAARILKGQLHHNPGEETRLEMDKFPFVALSKTYNTNAQVPDSAGTATAYLCGVKANEGTVGVSAATERSRCNTTQGNEVTSILRWAKDAGKSVGIVTTTRVNHATPSAAYAHSADRDWYSDNEMPPEALSQGCKDIAYQLMHNIRDIDVIMGGGRKYMYPKNKTDVEYESDEKARGTRLDGLDLVDTWKSFKPRYKHSHFIWNRTELLTLDPHNVDYLLGLFEPGDMQYELNRNNVTDPSLSEMVVVAIQILRKNPKGFFLLVEGGRIDHGHHEGKAKQALHEAVEMDRAIGQAGSLTSSEDTLTVVTADHSHVFTFGGYTPRGNSIFGLAPMLSDTDKKPFTAILYGNGPGYKVVGGERENVSMVDYAHNNYQAQSAVPLRHETHGGEDVAVFSKGPMAHLLHGVHEQNYVPHVMAYAACIGANLGHCAPASSDSSDSSDSSDSSDSSDSS

SEQ ID NO: 45 - protein, 524 aa, synthetic construct
  REGION 1..524: note = Synthetic: RMP-005 with Secretion Signal Peptide 2 huIgKVIII
MDMRVPAQLLGLLLLWLRGARCVPEKEKDPKYWRDQAQETLKYALELQKLNTNVAKNVIMFLGDGMGVSTVTAARILKGQLHHNPGEETRLEMDKFPFVALSKTYNTNAQVPDSAGTATAYLCGVKANEGTVGVSAATERSRCNTTQGNEVTSILRWAKDAGKSVGIVTTTRVNHATPSAAYAHSADRDWYSDNEMPPEALSQGCKDIAYQLMHNIRDIDVIMGGGRKYMYPKNKTDVEYESDEKARGTRLDGLDLVDTWKSFKPRYKHSHFIWNRTELLTLDPHNVDYLLGLFEPGDMQYELNRNNVTDPSLSEMVVVAIQILRKNPKGFFLLVEGGRIDHGHHEGKAKQALHEAVEMDRAIGQAGSLTSSEDTLTVVTADHSHVFTFGGYTPRGNSIFGLAPMLSDTDKKPFTAILYGNGPGYKVVGGERENVSMVDYAHNNYQAQSAVPLRHETHGGEDVAVFSKGPMAHLLHGVHEQNYVPHVMAYAACIGANLGHCAPASSDSSDSSDSSDSSDSSDSS

SEQ ID NO: 46 - protein, 526 aa, synthetic construct
  REGION 1..526: note = Synthetic: RMP-005 with Secretion Signal Peptide 3 huIgKVIII-AA (EF1a-hIgKVIII-AA-RMP5)
MDMRVPAQLLGLLLLWLRGARCAAVPEKEKDPKYWRDQAQETLKYALELQKLNTNVAKNVIMFLGDGMGVSTVTAARILKGQLHHNPGEETRLEMDKFPFVALSKTYNTNAQVPDSAGTATAYLCGVKANEGTVGVSAATERSRCNTTQGNEVTSILRWAKDAGKSVGIVTTTRVNHATPSAAYAHSADRDWYSDNEMPPEALSQGCKDIAYQLMHNIRDIDVIMGGGRKYMYPKNKTDVEYESDEKARGTRLDGLDLVDTWKSFKPRYKHSHFIWNRTELLTLDPHNVDYLLGLFEPGDMQYELNRNNVTDPSLSEMVVVAIQILRKNPKGFFLLVEGGRIDHGHHEGKAKQALHEAVEMDRAIGQAGSLTSSEDTLTVVTADHSHVFTFGGYTPRGNSIFGLAPMLSDTDKKPFTAILYGNGPGYKVVGGERENVSMVDYAHNNYQAQSAVPLRHETHGGEDVAVFSKGPMAHLLHGVHEQNYVPHVMAYAACIGANLGHCAPASSDSSDSSDSSDSSDSSDSS

SEQ ID NO: 47 - protein, 525 aa, synthetic construct
  REGION 1..525: note = Synthetic: RMP-005 with Secretion Signal Peptide 4 - huCD33tPA
MDAMKRGLCCVLLLCGAVFVSPSVPEKEKDPKYWRDQAQETLKYALELQKLNTNVAKNVIMFLGDGMGVSTVTAARILKGQLHHNPGEETRLEMDKFPFVALSKTYNTNAQVPDSAGTATAYLCGVKANEGTVGVSAATERSRCNTTQGNEVTSILRWAKDAGKSVGIVTTTRVNHATPSAAYAHSADRDWYSDNEMPPEALSQGCKDIAYQLMHNIRDIDVIMGGGRKYMYPKNKTDVEYESDEKARGTRLDGLDLVDTWKSFKPRYKHSHFIWNRTELLTLDPHNVDYLLGLFEPGDMQYELNRNNVTDPSLSEMVVVAIQILRKNPKGFFLLVEGGRIDHGHHEGKAKQALHEAVEMDRAIGQAGSLTSSEDTLTVVTADHSHVFTFGGYTPRGNSIFGLAPMLSDTDKKPFTAILYGNGPGYKVVGGERENVSMVDYAHNNYQAQSAVPLRHETHGGEDVAVFSKGPMAHLLHGVHEQNYVPHVMAYAACIGANLGHCAPASSDSSDSSDSSDSSDSSDSS

SEQ ID NO: 48 - protein, 527 aa, synthetic construct
  REGION 1..527: note = Synthetic: RMP-005 with Secretion Signal Peptide 5 huCD33tPA -AA
MDAMKRGLCCVLLLCGAVFVSPSAAVPEKEKDPKYWRDQAQETLKYALELQKLNTNVAKNVIMFLGDGMGVSTVTAARILKGQLHHNPGEETRLEMDKFPFVALSKTYNTNAQVPDSAGTATAYLCGVKANEGTVGVSAATERSRCNTTQGNEVTSILRWAKDAGKSVGIVTTTRVNHATPSAAYAHSADRDWYSDNEMPPEALSQGCKDIAYQLMHNIRDIDVIMGGGRKYMYPKNKTDVEYESDEKARGTRLDGLDLVDTWKSFKPRYKHSHFIWNRTELLTLDPHNVDYLLGLFEPGDMQYELNRNNVTDPSLSEMVVVAIQILRKNPKGFFLLVEGGRIDHGHHEGKAKQALHEAVEMDRAIGQAGSLTSSEDTLTVVTADHSHVFTFGGYTPRGNSIFGLAPMLSDTDKKPFTAILYGNGPGYKVVGGERENVSMVDYAHNNYQAQSAVPLRHETHGGEDVAVFSKGPMAHLLHGVHEQNYVPHVMAYAACIGANLGHCAPASSDSSDSSDSSDSSDSSDSS

SEQ ID NO: 49 - protein, 523 aa, synthetic construct
  REGION 1..523: note = Synthetic: RMP-005 with Secretion Signal Peptide 6 - Secrecon(EF1a-Secrecon-RMP5)
MWWRLWWLLLLLLLLWPMVWAVPEKEKDPKYWRDQAQETLKYALELQKLNTNVAKNVIMFLGDGMGVSTVTAARILKGQLHHNPGEETRLEMDKFPFVALSKTYNTNAQVPDSAGTATAYLCGVKANEGTVGVSAATERSRCNTTQGNEVTSILRWAKDAGKSVGIVTTTRVNHATPSAAYAHSADRDWYSDNEMPPEALSQGCKDIAYQLMHNIRDIDVIMGGGRKYMYPKNKTDVEYESDEKARGTRLDGLDLVDTWKSFKPRYKHSHFIWNRTELLTLDPHNVDYLLGLFEPGDMQYELNRNNVTDPSLSEMVVVAIQILRKNPKGFFLLVEGGRIDHGHHEGKAKQALHEAVEMDRAIGQAGSLTSSEDTLTVVTADHSHVFTFGGYTPRGNSIFGLAPMLSDTDKKPFTAILYGNGPGYKVVGGERENVSMVDYAHNNYQAQSAVPLRHETHGGEDVAVFSKGPMAHLLHGVHEQNYVPHVMAYAACIGANLGHCAPASSDSSDSSDSSDSSDSSDSS

SEQ ID NO: 50 - protein, 525 aa, synthetic construct
  REGION 1..525: note = Synthetic: RMP-005 with Secretion Signal Peptide 7 Secrecon-AA (EF1a-Secrecon-AA-RMP5)
MWWRLWWLLLLLLLLWPMVWAAAVPEKEKDPKYWRDQAQETLKYALELQKLNTNVAKNVIMFLGDGMGVSTVTAARILKGQLHHNPGEETRLEMDKFPFVALSKTYNTNAQVPDSAGTATAYLCGVKANEGTVGVSAATERSRCNTTQGNEVTSILRWAKDAGKSVGIVTTTRVNHATPSAAYAHSADRDWYSDNEMPPEALSQGCKDIAYQLMHNIRDIDVIMGGGRKYMYPKNKTDVEYESDEKARGTRLDGLDLVDTWKSFKPRYKHSHFIWNRTELLTLDPHNVDYLLGLFEPGDMQYELNRNNVTDPSLSEMVVVAIQILRKNPKGFFLLVEGGRIDHGHHEGKAKQALHEAVEMDRAIGQAGSLTSSEDTLTVVTADHSHVFTFGGYTPRGNSIFGLAPMLSDTDKKPFTAILYGNGPGYKVVGGERENVSMVDYAHNNYQAQSAVPLRHETHGGEDVAVFSKGPMAHLLHGVHEQNYVPHVMAYAACIGANLGHCAPASSDSSDSSDSSDSSDSSDSS

SEQ ID NO: 51 - protein, 522 aa, synthetic construct
  REGION 1..522: note = Synthetic: RMP-005 with Secretion Signal Peptide 8 - mIgKVIII (EF1a-mIgKVIII-AA-RMP5)
METDTLLLWVLLLWVPGSTGVPEKEKDPKYWRDQAQETLKYALELQKLNTNVAKNVIMFLGDGMGVSTVTAARILKGQLHHNPGEETRLEMDKFPFVALSKTYNTNAQVPDSAGTATAYLCGVKANEGTVGVSAATERSRCNTTQGNEVTSILRWAKDAGKSVGIVTTTRVNHATPSAAYAHSADRDWYSDNEMPPEALSQGCKDIAYQLMHNIRDIDVIMGGGRKYMYPKNKTDVEYESDEKARGTRLDGLDLVDTWKSFKPRYKHSHFIWNRTELLTLDPHNVDYLLGLFEPGDMQYELNRNNVTDPSLSEMVVVAIQILRKNPKGFFLLVEGGRIDHGHHEGKAKQALHEAVEMDRAIGQAGSLTSSEDTLTVVTADHSHVFTFGGYTPRGNSIFGLAPMLSDTDKKPFTAILYGNGPGYKVVGGERENVSMVDYAHNNYQAQSAVPLRHETHGGEDVAVFSKGPMAHLLHGVHEQNYVPHVMAYAACIGANLGHCAPASSDSSDSSDSSDSSDSSDSS

SEQ ID NO: 52 - protein, 524 aa, synthetic construct
  REGION 1..524: note = Synthetic: RMP-005 with Secretion Signal Peptide 9 mIgKVIII -AA
METDTLLLWVLLLWVPGSTGAAVPEKEKDPKYWRDQAQETLKYALELQKLNTNVAKNVIMFLGDGMGVSTVTAARILKGQLHHNPGEETRLEMDKFPFVALSKTYNTNAQVPDSAGTATAYLCGVKANEGTVGVSAATERSRCNTTQGNEVTSILRWAKDAGKSVGIVTTTRVNHATPSAAYAHSADRDWYSDNEMPPEALSQGCKDIAYQLMHNIRDIDVIMGGGRKYMYPKNKTDVEYESDEKARGTRLDGLDLVDTWKSFKPRYKHSHFIWNRTELLTLDPHNVDYLLGLFEPGDMQYELNRNNVTDPSLSEMVVVAIQILRKNPKGFFLLVEGGRIDHGHHEGKAKQALHEAVEMDRAIGQAGSLTSSEDTLTVVTADHSHVFTFGGYTPRGNSIFGLAPMLSDTDKKPFTAILYGNGPGYKVVGGERENVSMVDYAHNNYQAQSAVPLRHETHGGEDVAVFSKGPMAHLLHGVHEQNYVPHVMAYAACIGANLGHCAPASSDSSDSSDSSDSSDSSDSS

SEQ ID NO: 53 - protein, 521 aa, synthetic construct
  REGION 1..521: note = Synthetic: RMP-005 with Secretion Signal Peptide 10 - Alpha-lactalbumin(EF1a-aLA-RMP5)
MMSFVSLLLVGILFHATQAVPEKEKDPKYWRDQAQETLKYALELQKLNTNVAKNVIMFLGDGMGVSTVTAARILKGQLHHNPGEETRLEMDKFPFVALSKTYNTNAQVPDSAGTATAYLCGVKANEGTVGVSAATERSRCNTTQGNEVTSILRWAKDAGKSVGIVTTTRVNHATPSAAYAHSADRDWYSDNEMPPEALSQGCKDIAYQLMHNIRDIDVIMGGGRKYMYPKNKTDVEYESDEKARGTRLDGLDLVDTWKSFKPRYKHSHFIWNRTELLTLDPHNVDYLLGLFEPGDMQYELNRNNVTDPSLSEMVVVAIQILRKNPKGFFLLVEGGRIDHGHHEGKAKQALHEAVEMDRAIGQAGSLTSSEDTLTVVTADHSHVFTFGGYTPRGNSIFGLAPMLSDTDKKPFTAILYGNGPGYKVVGGERENVSMVDYAHNNYQAQSAVPLRHETHGGEDVAVFSKGPMAHLLHGVHEQNYVPHVMAYAACIGANLGHCAPASSDSSDSSDSSDSSDSSDSS

SEQ ID NO: 54 - protein, 519 aa, synthetic construct
  REGION 1..519: note = Synthetic: RMP-005 with Secretion Signal Peptide 11 SEAP - Native secreted alkaline phosphatase (EF1a-IgG2H-RMP5)
MLLLLLLLGLRLQLSLGVPEKEKDPKYWRDQAQETLKYALELQKLNTNVAKNVIMFLGDGMGVSTVTAARILKGQLHHNPGEETRLEMDKFPFVALSKTYNTNAQVPDSAGTATAYLCGVKANEGTVGVSAATERSRCNTTQGNEVTSILRWAKDAGKSVGIVTTTRVNHATPSAAYAHSADRDWYSDNEMPPEALSQGCKDIAYQLMHNIRDIDVIMGGGRKYMYPKNKTDVEYESDEKARGTRLDGLDLVDTWKSFKPRYKHSHFIWNRTELLTLDPHNVDYLLGLFEPGDMQYELNRNNVTDPSLSEMVVVAIQILRKNPKGFFLLVEGGRIDHGHHEGKAKQALHEAVEMDRAIGQAGSLTSSEDTLTVVTADHSHVFTFGGYTPRGNSIFGLAPMLSDTDKKPFTAILYGNGPGYKVVGGERENVSMVDYAHNNYQAQSAVPLRHETHGGEDVAVFSKGPMAHLLHGVHEQNYVPHVMAYAACIGANLGHCAPASSDSSDSSDSSDSSDSSDSS

SEQ ID NO: 55 - DNA, 10086 bp, synthetic construct
  misc_feature 1..10086: note = Synthetic: (RMP-005-IgG2H) (EF1a-IgG2H-RMP5)
  source 1..10086: mol_type = other DNA
gtactgggtctctctggttagaccagatctgagcctgggagctctctggctaactagggaacccactgcttaagcctcaataaagcttgccttgagtgcttcaagtagtgtgtgcccgtctgttgtgtgactctggtaactagagatccctcagacccttttagtcagtgtggaaaatctctagcagtggcgcccgaacagggacttgaaagcgaaagggaaaccagaggagctctctcgacgcaggactcggcttgctgaagcgcgcacggcaagaggcgaggggcggcgactggtgagtacgccaaaaattttgactagcggaggctagaaggagagagatgggtgcgagagcgtcagtattaagcgggggagaattagatcgcgatgggaaaaaattcggttaaggccagggggaaagaaaaaatataaattaaaacatatagtatgggcaagcagggagctagaacgattcgcagttaatcctggcctgttagaaacatcagaaggctgtagacaaatactgggacagctacaaccatcccttcagacaggatcagaagaacttagatcattatataatacagtagcaaccctctattgtgtgcatcaaaggatagagataaaagacaccaaggaagctttagacaagatagaggaagagcaaaacaaaagtaagaccaccgcacagcaagcggccgctgatcttcagacctggaggaggagatatgagggacaattggagaagtgaattatataaatataaagtagtaaaaattgaaccattaggagtagcacccaccaaggcaaagagaagagtggtgcagagagaaaaaagagcagtgggaataggagctttgttccttgggttcttgggagcagcaggaagcactatgggcgcagcgtcaatgacgctgacggtacaggccagacaattattgtctggtatagtgcagcagcagaacaatttgctgagggctattgaggcgcaacagcatctgttgcaactcacagtctggggcatcaagcagctccaggcaagaatcctggctgtggaaagatacctaaaggatcaacagctcctggggatttggggttgctctggaaaactcatttgcaccactgctgtgccttggaatgctagttggagtaataaatctctggaacagatttggaatcacacgacctggatggagtgggacagagaaattaacaattacacaagcttaatacactccttaattgaagaatcgcaaaaccagcaagaaaagaatgaacaagaattattggaattagataaatgggcaagtttgtggaattggtttaacataacaaattggctgtggtatataaaattattcataatgatagtaggaggcttggtaggtttaagaatagtttttgctgtactttctatagtgaatagagttaggcagggatattcaccattatcgtttcagacccacctcccaaccccgaggggacccgacaggcccgaaggaatagaagaagaaggtggagagagagacagagacagatccattcgattagtgaacggatcggcactgcgtgcgccaattctgcagacaaatggcagtattcatccacaattttaaaagaaaaggggggattggggggtacagtgcaggggaaagaatagtagacataatagcaacagacatacaaactaaagaattacaaaaacaaattacaaaaattcaaaattttcgggtttattacagggacagcagagatccagtttggttaattaaggatctgcgatcgctccggtgcccgtcagtgggcagagcgcacatcgcccacagtccccgagaagttggggggaggggtcggcaattgaaccggtgcctagagaaggtggcgcggggtaaactgggaaagtgatgtcgtgtactggctccgcctttttcccgagggtgggggagaaccgtatataagtgcagtagtcgccgtgaacgttctttttcgcaacgggtttgccgccagaacacagctgaagcttcgaggggctcgcatctctccttcacgcgcccgccgccctacctgaggccgccatccacgccggttgagtcgcgttctgccgcctcccgcctgtggtgcctcctgaactgcgtccgccgtctaggtaagtttaaagctcaggtcgagaccgggcctttgtccggcgctcccttggagcctacctagactcagccggctctccacgctttgcctgaccctgcttgctcaactctacgtctttgtttcgttttctgttctgcgccgttacagatccaagctgtgaccggcgcctaggatccccgggtaccggtcgtacgttcgaagctagcatgggatggtcctgcataatcctttttttggtcgcaacagccacaggtgtgcacagtcttgtccctgaaaaggagaaggaccccaaatattggagagaccaggctcaggaaaccctcaagtacgctcttgaactgcaaaagcttaatactaacgtggctaaaaacgtgataatgttcttgggggacggaatgggggtttcaaccgttaccgcggccagaatcttgaaagggcagctgcaccataacccaggcgaagaaacgaggctggagatggacaaatttccattcgtggcgctttctaagacctacaacactaacgcccaggtccctgactcagctggtacggccactgcctacctttgtggagtgaaggcaaatgaggggactgttggtgtttccgcagctactgagagatctcggtgtaatacgactcaaggtaatgaagttacatccatactccgatgggcaaaagacgcgggcaaatctgttgggattgttacaactactagggtgaaccatgcgacaccctctgcagcttatgcgcacagtgccgaccgagactggtattcagataatgagatgccacccgaggcccttagccagggctgcaaggacatagcctatcaattgatgcacaatatcagagacatagacgttataatgggtggtggtcgcaagtacatgtaccccaaaaacaaaaccgacgtagagtatgaatccgatgaaaaagctaggggcaccagactcgacggacttgatctggttgatacatggaaatcctttaaacctcggtataagcattcacatttcatctggaacaggaccgaacttctcacattggacccccacaatgttgactatctcctcggtttgtttgaaccaggggatatgcagtatgagctcaatcggaacaacgtcactgaccccagtttgagtgaaatggtcgttgttgcaatacaaattttgaggaaaaatccaaaggggtttttcttgttggtagagggcggacggatagatcacgggcaccacgaaggcaaagcaaaacaggccctgcacgaagccgttgaaatggatcgcgctatcggtcaagccggctccctgacgagtagtgaagataccttgaccgtcgtcactgcggatcatagccacgtttttacctttgggggatacacccccaggggcaactcaatttttggacttgcaccgatgctcagcgacacagataaaaagccttttactgcgattctgtatggcaacggccctggatacaaagtagtagggggtgaaagggaaaacgtcagcatggtggactatgcacacaataattatcaggcgcagtccgctgttccgctgcggcatgagactcacgggggagaggacgttgctgtcttttccaagggaccaatggctcatcttctccatggagtccatgagcaaaattatgtccctcatgtcatggcatacgctgcatgtataggagcaaatctcgggcactgtgcaccggcgtcctccgattccagcgacagttcagacagctctgacagctccgattcctccgactcaagttgagaattcgatatcaagcttatcgataatcaacctctggattacaaaatttgtgaaagattgactggtattcttaactatgttgctccttttacgctatgtggatacgctgctttaatgcctttgtatcatgctattgcttcccgtatggctttcattttctcctccttgtataaatcctggttgctgtctctttatgaggagttgtggcccgttgtcaggcaacgtggcgtggtgtgcactgtgtttgctgacgcaacccccactggttggggcattgccaccacctgtcagctcctttccgggactttcgctttccccctccctattgccacggcggaactcatcgccgcctgccttgcccgctgctggacaggggctcggctgttgggcactgacaattccgtggtgttgtcggggaaatcatcgtcctttccttggctgctcgcctgtgttgccacctggattctgcgcgggacgtccttctgctacgtcccttcggccctcaatccagcggaccttccttcccgcggcctgctgccggctctgcggcctcttccgcgtcttcgccttcgccctcagacgagtcggatctccctttgggccgcctccccgcatcgataccgtcgacctcgatcgagacctagaaaaacatggagcaatcacaagtagcaatacagcagctaccaatgctgattgtgcctggctagaagcacaagaggaggaggaggtgggttttccagtcacacctcaggtacctttaagaccaatgacttacaaggcagctgtagatcttagccactttttaaaagaaaaggggggactggaagggctaattcactcccaacgaagacaagatatccttgatctgtggatctaccacacacaaggctacttccctgattggcagaactacacaccagggccagggatcagatatccactgacctttggatggtgctacaagctagtaccagttgagcaagagaaggtagaagaagccaatgaaggagagaacacccgcttgttacaccctgtgagcctgcatgggatggatgacccggagagagaagtattagagtggaggtttgacagccgcctagcatttcatcacatggcccgagagctgcatccggactgtactgggtctctctggttagaccagatctgagcctgggagctctctggctaactagggaacccactgcttaagcctcaataaagcttgccttgagtgcttcaagtagtgtgtgcccgtctgttgtgtgactctggtaactagagatccctcagacccttttagtcagtgtggaaaatctctagcagggcccgtttaaacccgctgatcagcctcgactgtgccttctagttgccagccatctgttgtttgcccctcccccgtgccttccttgaccctggaaggtgccactcccactgtcctttcctaataaaatgaggaaattgcatcgcattgtctgagtaggtgtcattctattctggggggtggggtggggcaggacagcaagggggaggattgggaagacaatagcaggcatgctggggatgcggtgggctctatggcttctgaggcggaaagaaccagctggggctctagggggtatccccacgcgccctgtagcggcgcattaagcgcggcgggtgtggtggttacgcgcagcgtgaccgctacacttgccagcgccctagcgcccgctcctttcgctttcttcccttcctttctcgccacgttcgccggctttccccgtcaagctctaaatcgggggctccctttagggttccgatttagtgctttacggcacctcgaccccaaaaaacttgattagggtgatggttcacgtagtgggccatcgccctgatagacggtttttcgccctttgacgttggagtccacgttctttaatagtggactcttgttccaaactggaacaacactcaaccctatctcggtctattcttttgatttataagggattttgccgatttcggcctattggttaaaaaatgagctgatttaacaaaaatttaacgcgaattaattctgtggaatgtgtgtcagttagggtgtggaaagtccccaggctccccagcaggcagaagtatgcaaagcatgcatctcaattagtcagcaaccaggtgtggaaagtccccaggctccccagcaggcagaagtatgcaaagcatgcatctcaattagtcagcaaccatagtcccgcccctaactccgcccatcccgcccctaactccgcccagttccgcccattctccgccccatggctgactaattttttttatttatgcagaggccgaggccgcctctgcctctgagctattccagaagtagtgaggaggcttttttggaggcctaggcttttgcaaaaagctcccgggagcttgtatatccattttcggatctgatcagcacgtgttgacaattaatcatcggcatagtatatcggcatagtataatacgacaaggtgaggaactaaaccatggccaagttgaccagtgccgttccggtgctcaccgcgcgcgacgtcgccggagcggtcgagttctggaccgaccggctcgggttctcccgggacttcgtggaggacgacttcgccggtgtggtccgggacgacgtgaccctgttcatcagcgcggtccaggaccaggtggtgccggacaacaccctggcctgggtgtgggtgcgcggcctggacgagctgtacgccgagtggtcggaggtcgtgtccacgaacttccgggacgcctccgggccggccatgaccgagatcggcgagcagccgtgggggcgggagttcgccctgcgcgacccggccggcaactgcgtgcacttcgtggccgaggagcaggactgacacgtgctacgagatttcgattccaccgccgccttctatgaaaggttgggcttcggaatcgttttccgggacgccggctggatgatcctccagcgcggggatctcatgctggagttcttcgcccaccccaacttgtttattgcagcttataatggttacaaataaagcaatagcatcacaaatttcacaaataaagcatttttttcactgcattctagttgtggtttgtccaaactcatcaatgtatcttatcatgtctgtataccgtcgacctctagctagagcttggcgtaatcatggtcatagctgtttcctgtgtgaaattgttatccgctcacaattccacacaacatacgagccggaagcataaagtgtaaagcctggggtgcctaatgagtgagctaactcacattaattgcgttgcgctcactgcccgctttccagtcgggaaacctgtcgtgccagctgcattaatgaatcggccaacgcgcggggagaggcggtttgcgtattgggcgctcttccgcttcctcgctcactgactcgctgcgctcggtcgttcggctgcggcgagcggtatcagctcactcaaaggcggtaatacggttatccacagaatcaggggataacgcaggaaagaacatgtgagcaaaaggccagcaaaaggccaggaaccgtaaaaaggccgcgttgctggcgtttttccataggctccgcccccctgacgagcatcacaaaaatcgacgctcaagtcagaggtggcgaaacccgacaggactataaagataccaggcgtttccccctggaagctccctcgtgcgctctcctgttccgaccctgccgcttaccggatacctgtccgcctttctcccttcgggaagcgtggcgctttctcatagctcacgctgtaggtatctcagttcggtgtaggtcgttcgctccaagctgggctgtgtgcacgaaccccccgttcagcccgaccgctgcgccttatccggtaactatcgtcttgagtccaacccggtaagacacgacttatcgccactggcagcagccactggtaacaggattagcagagcgaggtatgtaggcggtgctacagagttcttgaagtggtggcctaactacggctacactagaagaacagtatttggtatctgcgctctgctgaagccagttaccttcggaaaaagagttggtagctcttgatccggcaaacaaaccaccgctggtagcggtggtttttttgtttgcaagcagcagattacgcgcagaaaaaaaggatctcaagaagatcctttgatcttttctacggggtctgacgctcagtggaacgaaaactcacgttaagggattttggtcatgagattatcaaaaaggatcttcacctagatccttttaaattaaaaatgaagttttaaatcaatctaaagtatatatgagtaaacttggtctgacagttaccaatgcttaatcagtgaggcacctatctcagcgatctgtctatttcgttcatccatagttgcctgactccccgtcgtgtagataactacgatacgggagggcttaccatctggccccagtgctgcaatgataccgcgagacccacgctcaccggctccagatttatcagcaataaaccagccagccggaagggccgagcgcagaagtggtcctgcaactttatccgcctccatccagtctattaattgttgccgggaagctagagtaagtagttcgccagttaatagtttgcgcaacgttgttgccattgctacaggcatcgtggtgtcacgctcgtcgtttggtatggcttcattcagctccggttcccaacgatcaaggcgagttacatgatcccccatgttgtgcaaaaaagcggttagctccttcggtcctccgatcgttgtcagaagtaagttggccgcagtgttatcactcatggttatggcagcactgcataattctcttactgtcatgccatccgtaagatgcttttctgtgactggtgagtactcaaccaagtcattctgagaatagtgtatgcggcgaccgagttgctcttgcccggcgtcaatacgggataataccgcgccacatagcagaactttaaaagtgctcatcattggaaaacgttcttcggggcgaaaactctcaaggatcttaccgctgttgagatccagttcgatgtaacccactcgtgcacccaactgatcttcagcatcttttactttcaccagcgtttctgggtgagcaaaaacaggaaggcaaaatgccgcaaaaaagggaataagggcgacacggaaatgttgaatactcatactcttcctttttcaatattattgaagcatttatcagggttattgtctcatgagcggatacatatttgaatgtatttagaaaaataaacaaataggggttccgcgcacatttccccgaaaagtgccacctgacgtcgacggatcgggagatctcccgatcccctatggtgcactctcagtacaatctgctctgatgccgcatagttaagccagtatctgctccctgcttgtgtgttggaggtcgctgagtagtgcgcgagcaaaatttaagctacaacaaggcaaggcttgaccgacaattgcatgaagaatctgcttagggttaggcgttttgcgctgcttcgcgatgtacgggccagatatacgcgttgacattgattattgactagttattaatagtaatcaattacggggtcattagttcatagcccatatatggagttccgcgttacataacttacggtaaatggcccgcctggctgaccgcccaacgacccccgcccattgacgtcaataatgacgtatgttcccatagtaacgccaatagggactttccattgacgtcaatgggtggagtatttacggtaaactgcccacttggcagtacatcaagtgtatcatatgccaagtacgccccctattgacgtcaatgacggtaaatggcccgcctggcattatgcccagtacatgaccttatgggactttcctacttggcagtacatctacgtattagtcatcgctattaccatggtgatgcggttttggcagtacatcaatgggcgtggatagcggtttgactcacggggatttccaagtctccaccccattgacgtcaatgggagtttgttttggcaccaaaatcaacgggactttccaaaatgtcgtaacaactccgccccattgacgcaaatgggcggtaggcgtgtacggtgggaggtctatataagcagcgcgttttgcct

SEQ ID NO: 56 - DNA, 10095 bp, synthetic construct
  misc_feature 1..10095: note = Synthetic: (RMP005-huIgKVIII)
  source 1..10095: mol_type = other DNA
gtactgggtctctctggttagaccagatctgagcctgggagctctctggctaactagggaacccactgcttaagcctcaataaagcttgccttgagtgcttcaagtagtgtgtgcccgtctgttgtgtgactctggtaactagagatccctcagacccttttagtcagtgtggaaaatctctagcagtggcgcccgaacagggacttgaaagcgaaagggaaaccagaggagctctctcgacgcaggactcggcttgctgaagcgcgcacggcaagaggcgaggggcggcgactggtgagtacgccaaaaattttgactagcggaggctagaaggagagagatgggtgcgagagcgtcagtattaagcgggggagaattagatcgcgatgggaaaaaattcggttaaggccagggggaaagaaaaaatataaattaaaacatatagtatgggcaagcagggagctagaacgattcgcagttaatcctggcctgttagaaacatcagaaggctgtagacaaatactgggacagctacaaccatcccttcagacaggatcagaagaacttagatcattatataatacagtagcaaccctctattgtgtgcatcaaaggatagagataaaagacaccaaggaagctttagacaagatagaggaagagcaaaacaaaagtaagaccaccgcacagcaagcggccgctgatcttcagacctggaggaggagatatgagggacaattggagaagtgaattatataaatataaagtagtaaaaattgaaccattaggagtagcacccaccaaggcaaagagaagagtggtgcagagagaaaaaagagcagtgggaataggagctttgttccttgggttcttgggagcagcaggaagcactatgggcgcagcgtcaatgacgctgacggtacaggccagacaattattgtctggtatagtgcagcagcagaacaatttgctgagggctattgaggcgcaacagcatctgttgcaactcacagtctggggcatcaagcagctccaggcaagaatcctggctgtggaaagatacctaaaggatcaacagctcctggggatttggggttgctctggaaaactcatttgcaccactgctgtgccttggaatgctagttggagtaataaatctctggaacagatttggaatcacacgacctggatggagtgggacagagaaattaacaattacacaagcttaatacactccttaattgaagaatcgcaaaaccagcaagaaaagaatgaacaagaattattggaattagataaatgggcaagtttgtggaattggtttaacataacaaattggctgtggtatataaaattattcataatgatagtaggaggcttggtaggtttaagaatagtttttgctgtactttctatagtgaatagagttaggcagggatattcaccattatcgtttcagacccacctcccaaccccgaggggacccgacaggcccgaaggaatagaagaagaaggtggagagagagacagagacagatccattcgattagtgaacggatcggcactgcgtgcgccaattctgcagacaaatggcagtattcatccacaattttaaaagaaaaggggggattggggggtacagtgcaggggaaagaatagtagacataatagcaacagacatacaaactaaagaattacaaaaacaaattacaaaaattcaaaattttcgggtttattacagggacagcagagatccagtttggttaattaaggatctgcgatcgctccggtgcccgtcagtgggcagagcgcacatcgcccacagtccccgagaagttggggggaggggtcggcaattgaaccggtgcctagagaaggtggcgcggggtaaactgggaaagtgatgtcgtgtactggctccgcctttttcccgagggtgggggagaaccgtatataagtgcagtagtcgccgtgaacgttctttttcgcaacgggtttgccgccagaacacagctgaagcttcgaggggctcgcatctctccttcacgcgcccgccgccctacctgaggccgccatccacgccggttgagtcgcgttctgccgcctcccgcctgtggtgcctcctgaactgcgtccgccgtctaggtaagtttaaagctcaggtcgagaccgggcctttgtccggcgctcccttggagcctacctagactcagccggctctccacgctttgcctgaccctgcttgctcaactctacgtctttgtttcgttttctgttctgcgccgttacagatccaagctgtgaccggcgcctaggatccccgggtaccggtcgtacgttcgaagctagcatggatatgcgcgtacccgctcaacttctgggtttgttgctgctttggctcaggggagcccgctgtcttgtccctgaaaaggagaaggaccccaaatattggagagaccaggctcaggaaaccctcaagtacgctcttgaactgcaaaagcttaatactaacgtggctaaaaacgtgataatgttcttgggggacggaatgggggtttcaaccgttaccgcggccagaatcttgaaagggcagctgcaccataacccaggcgaagaaacgaggctggagatggacaaatttccattcgtggcgctttctaagacctacaacactaacgcccaggtccctgactcagctggtacggccactgcctacctttgtggagtgaaggcaaatgaggggactgttggtgtttccgcagctactgagagatctcggtgtaatacgactcaaggtaatgaagttacatccatactccgatgggcaaaagacgcgggcaaatctgttgggattgttacaactactagggtgaaccatgcgacaccctctgcagcttatgcgcacagtgccgaccgagactggtattcagataatgagatgccacccgaggcccttagccagggctgcaaggacatagcctatcaattgatgcacaatatcagagacatagacgttataatgggtggtggtcgcaagtacatgtaccccaaaaacaaaaccgacgtagagtatgaatccgatgaaaaagctaggggcaccagactcgacggacttgatctggttgatacatggaaatcctttaaacctcggtataagcattcacatttcatctggaacaggaccgaacttctcacattggacccccacaatgttgactatctcctcggtttgtttgaaccaggggatatgcagtatgagctcaatcggaacaacgtcactgaccccagtttgagtgaaatggtcgttgttgcaatacaaattttgaggaaaaatccaaaggggtttttcttgttggtagagggcggacggatagatcacgggcaccacgaaggcaaagcaaaacaggccctgcacgaagccgttgaaatggatcgcgctatcggtcaagccggctccctgacgagtagtgaagataccttgaccgtcgtcactgcggatcatagccacgtttttacctttgggggatacacccccaggggcaactcaatttttggacttgcaccgatgctcagcgacacagataaaaagccttttactgcgattctgtatggcaacggccctggatacaaagtagtagggggtgaaagggaaaacgtcagcatggtggactatgcacacaataattatcaggcgcagtccgctgttccgctgcggcatgagactcacgggggagaggacgttgctgtcttttccaagggaccaatggctcatcttctccatggagtccatgagcaaaattatgtccctcatgtcatggcatacgctgcatgtataggagcaaatctcgggcactgtgcaccggcgtcctccgattccagcgacagttcagacagctctgacagctccgattcctccgactcaagttgagaattcgatatcaagcttatcgataatcaacctctggattacaaaatttgtgaaagattgactggtattcttaactatgttgctccttttacgctatgtggatacgctgctttaatgcctttgtatcatgctattgcttcccgtatggctttcattttctcctccttgtataaatcctggttgctgtctctttatgaggagttgtggcccgttgtcaggcaacgtggcgtggtgtgcactgtgtttgctgacgcaacccccactggttggggcattgccaccacctgtcagctcctttccgggactttcgctttccccctccctattgccacggcggaactcatcgccgcctgccttgcccgctgctggacaggggctcggctgttgggcactgacaattccgtggtgttgtcggggaaatcatcgtcctttccttggctgctcgcctgtgttgccacctggattctgcgcgggacgtccttctgctacgtcccttcggccctcaatccagcggaccttccttcccgcggcctgctgccggctctgcggcctcttccgcgtcttcgccttcgccctcagacgagtcggatctccctttgggccgcctccccgcatcgataccgtcgacctcgatcgagacctagaaaaacatggagcaatcacaagtagcaatacagcagctaccaatgctgattgtgcctggctagaagcacaagaggaggaggaggtgggttttccagtcacacctcaggtacctttaagaccaatgacttacaaggcagctgtagatcttagccactttttaaaagaaaaggggggactggaagggctaattcactcccaacgaagacaagatatccttgatctgtggatctaccacacacaaggctacttccctgattggcagaactacacaccagggccagggatcagatatccactgacctttggatggtgctacaagctagtaccagttgagcaagagaaggtagaagaagccaatgaaggagagaacacccgcttgttacaccctgtgagcctgcatgggatggatgacccggagagagaagtattagagtggaggtttgacagccgcctagcatttcatcacatggcccgagagctgcatccggactgtactgggtctctctggttagaccagatctgagcctgggagctctctggctaactagggaacccactgcttaagcctcaataaagcttgccttgagtgcttcaagtagtgtgtgcccgtctgttgtgtgactctggtaactagagatccctcagacccttttagtcagtgtggaaaatctctagcagggcccgtttaaacccgctgatcagcctcgactgtgccttctagttgccagccatctgttgtttgcccctcccccgtgccttccttgaccctggaaggtgccactcccactgtcctttcctaataaaatgaggaaattgcatcgcattgtctgagtaggtgtcattctattctggggggtggggtggggcaggacagcaagggggaggattgggaagacaatagcaggcatgctggggatgcggtgggctctatggcttctgaggcggaaagaaccagctggggctctagggggtatccccacgcgccctgtagcggcgcattaagcgcggcgggtgtggtggttacgcgcagcgtgaccgctacacttgccagcgccctagcgcccgctcctttcgctttcttcccttcctttctcgccacgttcgccggctttccccgtcaagctctaaatcgggggctccctttagggttccgatttagtgctttacggcacctcgaccccaaaaaacttgattagggtgatggttcacgtagtgggccatcgccctgatagacggtttttcgccctttgacgttggagtccacgttctttaatagtggactcttgttccaaactggaacaacactcaaccctatctcggtctattcttttgatttataagggattttgccgatttcggcctattggttaaaaaatgagctgatttaacaaaaatttaacgcgaattaattctgtggaatgtgtgtcagttagggtgtggaaagtccccaggctccccagcaggcagaagtatgcaaagcatgcatctcaattagtcagcaaccaggtgtggaaagtccccaggctccccagcaggcagaagtatgcaaagcatgcatctcaattagtcagcaaccatagtcccgcccctaactccgcccatcccgcccctaactccgcccagttccgcccattctccgccccatggctgactaattttttttatttatgcagaggccgaggccgcctctgcctctgagctattccagaagtagtgaggaggcttttttggaggcctaggcttttgcaaaaagctcccgggagcttgtatatccattttcggatctgatcagcacgtgttgacaattaatcatcggcatagtatatcggcatagtataatacgacaaggtgaggaactaaaccatggccaagttgaccagtgccgttccggtgctcaccgcgcgcgacgtcgccggagcggtcgagttctggaccgaccggctcgggttctcccgggacttcgtggaggacgacttcgccggtgtggtccgggacgacgtgaccctgttcatcagcgcggtccaggaccaggtggtgccggacaacaccctggcctgggtgtgggtgcgcggcctggacgagctgtacgccgagtggtcggaggtcgtgtccacgaacttccgggacgcctccgggccggccatgaccgagatcggcgagcagccgtgggggcgggagttcgccctgcgcgacccggccggcaactgcgtgcacttcgtggccgaggagcaggactgacacgtgctacgagatttcgattccaccgccgccttctatgaaaggttgggcttcggaatcgttttccgggacgccggctggatgatcctccagcgcggggatctcatgctggagttcttcgcccaccccaacttgtttattgcagcttataatggttacaaataaagcaatagcatcacaaatttcacaaataaagcatttttttcactgcattctagttgtggtttgtccaaactcatcaatgtatcttatcatgtctgtataccgtcgacctctagctagagcttggcgtaatcatggtcatagctgtttcctgtgtgaaattgttatccgctcacaattccacacaacatacgagccggaagcataaagtgtaaagcctggggtgcctaatgagtgagctaactcacattaattgcgttgcgctcactgcccgctttccagtcgggaaacctgtcgtgccagctgcattaatgaatcggccaacgcgcggggagaggcggtttgcgtattgggcgctcttccgcttcctcgctcactgactcgctgcgctcggtcgttcggctgcggcgagcggtatcagctcactcaaaggcggtaatacggttatccacagaatcaggggataacgcaggaaagaacatgtgagcaaaaggccagcaaaaggccaggaaccgtaaaaaggccgcgttgctggcgtttttccataggctccgcccccctgacgagcatcacaaaaatcgacgctcaagtcagaggtggcgaaacccgacaggactataaagataccaggcgtttccccctggaagctccctcgtgcgctctcctgttccgaccctgccgcttaccggatacctgtccgcctttctcccttcgggaagcgtggcgctttctcatagctcacgctgtaggtatctcagttcggtgtaggtcgttcgctccaagctgggctgtgtgcacgaaccccccgttcagcccgaccgctgcgccttatccggtaactatcgtcttgagtccaacccggtaagacacgacttatcgccactggcagcagccactggtaacaggattagcagagcgaggtatgtaggcggtgctacagagttcttgaagtggtggcctaactacggctacactagaagaacagtatttggtatctgcgctctgctgaagccagttaccttcggaaaaagagttggtagctcttgatccggcaaacaaaccaccgctggtagcggtggtttttttgtttgcaagcagcagattacgcgcagaaaaaaaggatctcaagaagatcctttgatcttttctacggggtctgacgctcagtggaacgaaaactcacgttaagggattttggtcatgagattatcaaaaaggatcttcacctagatccttttaaattaaaaatgaagttttaaatcaatctaaagtatatatgagtaaacttggtctgacagttaccaatgcttaatcagtgaggcacctatctcagcgatctgtctatttcgttcatccatagttgcctgactccccgtcgtgtagataactacgatacgggagggcttaccatctggccccagtgctgcaatgataccgcgagacccacgctcaccggctccagatttatcagcaataaaccagccagccggaagggccgagcgcagaagtggtcctgcaactttatccgcctccatccagtctattaattgttgccgggaagctagagtaagtagttcgccagttaatagtttgcgcaacgttgttgccattgctacaggcatcgtggtgtcacgctcgtcgtttggtatggcttcattcagctccggttcccaacgatcaaggcgagttacatgatcccccatgttgtgcaaaaaagcggttagctccttcggtcctccgatcgttgtcagaagtaagttggccgcagtgttatcactcatggttatggcagcactgcataattctcttactgtcatgccatccgtaagatgcttttctgtgactggtgagtactcaaccaagtcattctgagaatagtgtatgcggcgaccgagttgctcttgcccggcgtcaatacgggataataccgcgccacatagcagaactttaaaagtgctcatcattggaaaacgttcttcggggcgaaaactctcaaggatcttaccgctgttgagatccagttcgatgtaacccactcgtgcacccaactgatcttcagcatcttttactttcaccagcgtttctgggtgagcaaaaacaggaaggcaaaatgccgcaaaaaagggaataagggcgacacggaaatgttgaatactcatactcttcctttttcaatattattgaagcatttatcagggttattgtctcatgagcggatacatatttgaatgtatttagaaaaataaacaaataggggttccgcgcacatttccccgaaaagtgccacctgacgtcgacggatcgggagatctcccgatcccctatggtgcactctcagtacaatctgctctgatgccgcatagttaagccagtatctgctccctgcttgtgtgttggaggtcgctgagtagtgcgcgagcaaaatttaagctacaacaaggcaaggcttgaccgacaattgcatgaagaatctgcttagggttaggcgttttgcgctgcttcgcgatgtacgggccagatatacgcgttgacattgattattgactagttattaatagtaatcaattacggggtcattagttcatagcccatatatggagttccgcgttacataacttacggtaaatggcccgcctggctgaccgcccaacgacccccgcccattgacgtcaataatgacgtatgttcccatagtaacgccaatagggactttccattgacgtcaatgggtggagtatttacggtaaactgcccacttggcagtacatcaagtgtatcatatgccaagtacgccccctattgacgtcaatgacggtaaatggcccgcctggcattatgcccagtacatgaccttatgggactttcctacttggcagtacatctacgtattagtcatcgctattaccatggtgatgcggttttggcagtacatcaatgggcgtggatagcggtttgactcacggggatttccaagtctccaccccattgacgtcaatgggagtttgttttggcaccaaaatcaacgggactttccaaaatgtcgtaacaactccgccccattgacgcaaatgggcggtaggcgtgtacggtgggaggtctatataagcagcgcgttttgcct

SEQ ID NO: 57 - DNA, 10101 bp, synthetic construct
  misc_feature 1..10101: note = Synthetic: RMP005-huIgKVIII-AA (EF1a-hIgKVIII-AA-RMP5)
  source 1..10101: mol_type = other DNA
gtactgggtctctctggttagaccagatctgagcctgggagctctctggctaactagggaacccactgcttaagcctcaataaagcttgccttgagtgcttcaagtagtgtgtgcccgtctgttgtgtgactctggtaactagagatccctcagacccttttagtcagtgtggaaaatctctagcagtggcgcccgaacagggacttgaaagcgaaagggaaaccagaggagctctctcgacgcaggactcggcttgctgaagcgcgcacggcaagaggcgaggggcggcgactggtgagtacgccaaaaattttgactagcggaggctagaaggagagagatgggtgcgagagcgtcagtattaagcgggggagaattagatcgcgatgggaaaaaattcggttaaggccagggggaaagaaaaaatataaattaaaacatatagtatgggcaagcagggagctagaacgattcgcagttaatcctggcctgttagaaacatcagaaggctgtagacaaatactgggacagctacaaccatcccttcagacaggatcagaagaacttagatcattatataatacagtagcaaccctctattgtgtgcatcaaaggatagagataaaagacaccaaggaagctttagacaagatagaggaagagcaaaacaaaagtaagaccaccgcacagcaagcggccgctgatcttcagacctggaggaggagatatgagggacaattggagaagtgaattatataaatataaagtagtaaaaattgaaccattaggagtagcacccaccaaggcaaagagaagagtggtgcagagagaaaaaagagcagtgggaataggagctttgttccttgggttcttgggagcagcaggaagcactatgggcgcagcgtcaatgacgctgacggtacaggccagacaattattgtctggtatagtgcagcagcagaacaatttgctgagggctattgaggcgcaacagcatctgttgcaactcacagtctggggcatcaagcagctccaggcaagaatcctggctgtggaaagatacctaaaggatcaacagctcctggggatttggggttgctctggaaaactcatttgcaccactgctgtgccttggaatgctagttggagtaataaatctctggaacagatttggaatcacacgacctggatggagtgggacagagaaattaacaattacacaagcttaatacactccttaattgaagaatcgcaaaaccagcaagaaaagaatgaacaagaattattggaattagataaatgggcaagtttgtggaattggtttaacataacaaattggctgtggtatataaaattattcataatgatagtaggaggcttggtaggtttaagaatagtttttgctgtactttctatagtgaatagagttaggcagggatattcaccattatcgtttcagacccacctcccaaccccgaggggacccgacaggcccgaaggaatagaagaagaaggtggagagagagacagagacagatccattcgattagtgaacggatcggcactgcgtgcgccaattctgcagacaaatggcagtattcatccacaattttaaaagaaaaggggggattggggggtacagtgcaggggaaagaatagtagacataatagcaacagacatacaaactaaagaattacaaaaacaaattacaaaaattcaaaattttcgggtttattacagggacagcagagatccagtttggttaattaaggatctgcgatcgctccggtgcccgtcagtgggcagagcgcacatcgcccacagtccccgagaagttggggggaggggtcggcaattgaaccggtgcctagagaaggtggcgcggggtaaactgggaaagtgatgtcgtgtactggctccgcctttttcccgagggtgggggagaaccgtatataagtgcagtagtcgccgtgaacgttctttttcgcaacgggtttgccgccagaacacagctgaagcttcgaggggctcgcatctctccttcacgcgcccgccgccctacctgaggccgccatccacgccggttgagtcgcgttctgccgcctcccgcctgtggtgcctcctgaactgcgtccgccgtctaggtaagtttaaagctcaggtcgagaccgggcctttgtccggcgctcccttggagcctacctagactcagccggctctccacgctttgcctgaccctgcttgctcaactctacgtctttgtttcgttttctgttctgcgccgttacagatccaagctgtgaccggcgcctaggatccccgggtaccggtcgtacgttcgaagctagcatggatatgcgcgtacccgctcaacttctgggtttgttgctgctttggctcaggggagcccgctgtgccgcgcttgtccctgaaaaggagaaggaccccaaatattggagagaccaggctcaggaaaccctcaagtacgctcttgaactgcaaaagcttaatactaacgtggctaaaaacgtgataatgttcttgggggacggaatgggggtttcaaccgttaccgcggccagaatcttgaaagggcagctgcaccataacccaggcgaagaaacgaggctggagatggacaaatttccattcgtggcgctttctaagacctacaacactaacgcccaggtccctgactcagctggtacggccactgcctacctttgtggagtgaaggcaaatgaggggactgttggtgtttccgcagctactgagagatctcggtgtaatacgactcaaggtaatgaagttacatccatactccgatgggcaaaagacgcgggcaaatctgttgggattgttacaactactagggtgaaccatgcgacaccctctgcagcttatgcgcacagtgccgaccgagactggtattcagataatgagatgccacccgaggcccttagccagggctgcaaggacatagcctatcaattgatgcacaatatcagagacatagacgttataatgggtggtggtcgcaagtacatgtaccccaaaaacaaaaccgacgtagagtatgaatccgatgaaaaagctaggggcaccagactcgacggacttgatctggttgatacatggaaatcctttaaacctcggtataagcattcacatttcatctggaacaggaccgaacttctcacattggacccccacaatgttgactatctcctcggtttgtttgaaccaggggatatgcagtatgagctcaatcggaacaacgtcactgaccccagtttgagtgaaatggtcgttgttgcaatacaaattttgaggaaaaatccaaaggggtttttcttgttggtagagggcggacggatagatcacgggcaccacgaaggcaaagcaaaacaggccctgcacgaagccgttgaaatggatcgcgctatcggtcaagccggctccctgacgagtagtgaagataccttgaccgtcgtcactgcggatcatagccacgtttttacctttgggggatacacccccaggggcaactcaatttttggacttgcaccgatgctcagcgacacagataaaaagccttttactgcgattctgtatggcaacggccctggatacaaagtagtagggggtgaaagggaaaacgtcagcatggtggactatgcacacaataattatcaggcgcagtccgctgttccgctgcggcatgagactcacgggggagaggacgttgctgtcttttccaagggaccaatggctcatcttctccatggagtccatgagcaaaattatgtccctcatgtcatggcatacgctgcatgtataggagcaaatctcgggcactgtgcaccggcgtcctccgattccagcgacagttcagacagctctgacagctccgattcctccgactcaagttgagaattcgatatcaagcttatcgataatcaacctctggattacaaaatttgtgaaagattgactggtattcttaactatgttgctccttttacgctatgtggatacgctgctttaatgcctttgtatcatgctattgcttcccgtatggctttcattttctcctccttgtataaatcctggttgctgtctctttatgaggagttgtggcccgttgtcaggcaacgtggcgtggtgtgcactgtgtttgctgacgcaacccccactggttggggcattgccaccacctgtcagctcctttccgggactttcgctttccccctccctattgccacggcggaactcatcgccgcctgccttgcccgctgctggacaggggctcggctgttgggcactgacaattccgtggtgttgtcggggaaatcatcgtcctttccttggctgctcgcctgtgttgccacctggattctgcgcgggacgtccttctgctacgtcccttcggccctcaatccagcggaccttccttcccgcggcctgctgccggctctgcggcctcttccgcgtcttcgccttcgccctcagacgagtcggatctccctttgggccgcctccccgcatcgataccgtcgacctcgatcgagacctagaaaaacatggagcaatcacaagtagcaatacagcagctaccaatgctgattgtgcctggctagaagcacaagaggaggaggaggtgggttttccagtcacacctcaggtacctttaagaccaatgacttacaaggcagctgtagatcttagccactttttaaaagaaaaggggggactggaagggctaattcactcccaacgaagacaagatatccttgatctgtggatctaccacacacaaggctacttccctgattggcagaactacacaccagggccagggatcagatatccactgacctttggatggtgctacaagctagtaccagttgagcaagagaaggtagaagaagccaatgaaggagagaacacccgcttgttacaccctgtgagcctgcatgggatggatgacccggagagagaagtattagagtggaggtttgacagccgcctagcatttcatcacatggcccgagagctgcatccggactgtactgggtctctctggttagaccagatctgagcctgggagctctctggctaactagggaacccactgcttaagcctcaataaagcttgccttgagtgcttcaagtagtgtgtgcccgtctgttgtgtgactctggtaactagagatccctcagacccttttagtcagtgtggaaaatctctagcagggcccgtttaaacccgctgatcagcctcgactgtgccttctagttgccagccatctgttgtttgcccctcccccgtgccttccttgaccctggaaggtgccactcccactgtcctttcctaataaaatgaggaaattgcatcgcattgtctgagtaggtgtcattctattctggggggtggggtggggcaggacagcaagggggaggattgggaagacaatagcaggcatgctggggatgcggtgggctctatggcttctgaggcggaaagaaccagctggggctctagggggtatccccacgcgccctgtagcggcgcattaagcgcggcgggtgtggtggttacgcgcagcgtgaccgctacacttgccagcgccctagcgcccgctcctttcgctttcttcccttcctttctcgccacgttcgccggctttccccgtcaagctctaaatcgggggctccctttagggttccgatttagtgctttacggcacctcgaccccaaaaaacttgattagggtgatggttcacgtagtgggccatcgccctgatagacggtttttcgccctttgacgttggagtccacgttctttaatagtggactcttgttccaaactggaacaacactcaaccctatctcggtctattcttttgatttataagggattttgccgatttcggcctattggttaaaaaatgagctgatttaacaaaaatttaacgcgaattaattctgtggaatgtgtgtcagttagggtgtggaaagtccccaggctccccagcaggcagaagtatgcaaagcatgcatctcaattagtcagcaaccaggtgtggaaagtccccaggctccccagcaggcagaagtatgcaaagcatgcatctcaattagtcagcaaccatagtcccgcccctaactccgcccatcccgcccctaactccgcccagttccgcccattctccgccccatggctgactaattttttttatttatgcagaggccgaggccgcctctgcctctgagctattccagaagtagtgaggaggcttttttggaggcctaggcttttgcaaaaagctcccgggagcttgtatatccattttcggatctgatcagcacgtgttgacaattaatcatcggcatagtatatcggcatagtataatacgacaaggtgaggaactaaaccatggccaagttgaccagtgccgttccggtgctcaccgcgcgcgacgtcgccggagcggtcgagttctggaccgaccggctcgggttctcccgggacttcgtggaggacgacttcgccggtgtggtccgggacgacgtgaccctgttcatcagcgcggtccaggaccaggtggtgccggacaacaccctggcctgggtgtgggtgcgcggcctggacgagctgtacgccgagtggtcggaggtcgtgtccacgaacttccgggacgcctccgggccggccatgaccgagatcggcgagcagccgtgggggcgggagttcgccctgcgcgacccggccggcaactgcgtgcacttcgtggccgaggagcaggactgacacgtgctacgagatttcgattccaccgccgccttctatgaaaggttgggcttcggaatcgttttccgggacgccggctggatgatcctccagcgcggggatctcatgctggagttcttcgcccaccccaacttgtttattgcagcttataatggttacaaataaagcaatagcatcacaaatttcacaaataaagcatttttttcactgcattctagttgtggtttgtccaaactcatcaatgtatcttatcatgtctgtataccgtcgacctctagctagagcttggcgtaatcatggtcatagctgtttcctgtgtgaaattgttatccgctcacaattccacacaacatacgagccggaagcataaagtgtaaagcctggggtgcctaatgagtgagctaactcacattaattgcgttgcgctcactgcccgctttccagtcgggaaacctgtcgtgccagctgcattaatgaatcggccaacgcgcggggagaggcggtttgcgtattgggcgctcttccgcttcctcgctcactgactcgctgcgctcggtcgttcggctgcggcgagcggtatcagctcactcaaaggcggtaatacggttatccacagaatcaggggataacgcaggaaagaacatgtgagcaaaaggccagcaaaaggccaggaaccgtaaaaaggccgcgttgctggcgtttttccataggctccgcccccctgacgagcatcacaaaaatcgacgctcaagtcagaggtggcgaaacccgacaggactataaagataccaggcgtttccccctggaagctccctcgtgcgctctcctgttccgaccctgccgcttaccggatacctgtccgcctttctcccttcgggaagcgtggcgctttctcatagctcacgctgtaggtatctcagttcggtgtaggtcgttcgctccaagctgggctgtgtgcacgaaccccccgttcagcccgaccgctgcgccttatccggtaactatcgtcttgagtccaacccggtaagacacgacttatcgccactggcagcagccactggtaacaggattagcagagcgaggtatgtaggcggtgctacagagttcttgaagtggtggcctaactacggctacactagaagaacagtatttggtatctgcgctctgctgaagccagttaccttcggaaaaagagttggtagctcttgatccggcaaacaaaccaccgctggtagcggtggtttttttgtttgcaagcagcagattacgcgcagaaaaaaaggatctcaagaagatcctttgatcttttctacggggtctgacgctcagtggaacgaaaactcacgttaagggattttggtcatgagattatcaaaaaggatcttcacctagatccttttaaattaaaaatgaagttttaaatcaatctaaagtatatatgagtaaacttggtctgacagttaccaatgcttaatcagtgaggcacctatctcagcgatctgtctatttcgttcatccatagttgcctgactccccgtcgtgtagataactacgatacgggagggcttaccatctggccccagtgctgcaatgataccgcgagacccacgctcaccggctccagatttatcagcaataaaccagccagccggaagggccgagcgcagaagtggtcctgcaactttatccgcctccatccagtctattaattgttgccgggaagctagagtaagtagttcgccagttaatagtttgcgcaacgttgttgccattgctacaggcatcgtggtgtcacgctcgtcgtttggtatggcttcattcagctccggttcccaacgatcaaggcgagttacatgatcccccatgttgtgcaaaaaagcggttagctccttcggtcctccgatcgttgtcagaagtaagttggccgcagtgttatcactcatggttatggcagcactgcataattctcttactgtcatgccatccgtaagatgcttttctgtgactggtgagtactcaaccaagtcattctgagaatagtgtatgcggcgaccgagttgctcttgcccggcgtcaatacgggataataccgcgccacatagcagaactttaaaagtgctcatcattggaaaacgttcttcggggcgaaaactctcaaggatcttaccgctgttgagatccagttcgatgtaacccactcgtgcacccaactgatcttcagcatcttttactttcaccagcgtttctgggtgagcaaaaacaggaaggcaaaatgccgcaaaaaagggaataagggcgacacggaaatgttgaatactcatactcttcctttttcaatattattgaagcatttatcagggttattgtctcatgagcggatacatatttgaatgtatttagaaaaataaacaaataggggttccgcgcacatttccccgaaaagtgccacctgacgtcgacggatcgggagatctcccgatcccctatggtgcactctcagtacaatctgctctgatgccgcatagttaagccagtatctgctccctgcttgtgtgttggaggtcgctgagtagtgcgcgagcaaaatttaagctacaacaaggcaaggcttgaccgacaattgcatgaagaatctgcttagggttaggcgttttgcgctgcttcgcgatgtacgggccagatatacgcgttgacattgattattgactagttattaatagtaatcaattacggggtcattagttcatagcccatatatggagttccgcgttacataacttacggtaaatggcccgcctggctgaccgcccaacgacccccgcccattgacgtcaataatgacgtatgttcccatagtaacgccaatagggactttccattgacgtcaatgggtggagtatttacggtaaactgcccacttggcagtacatcaagtgtatcatatgccaagtacgccccctattgacgtcaatgacggtaaatggcccgcctggcattatgcccagtacatgaccttatgggactttcctacttggcagtacatctacgtattagtcatcgctattaccatggtgatgcggttttggcagtacatcaatgggcgtggatagcggtttgactcacggggatttccaagtctccaccccattgacgtcaatgggagtttgttttggcaccaaaatcaacgggactttccaaaatgtcgtaacaactccgccccattgacgcaaatgggcggtaggcgtgtacggtgggaggtctatataagcagcgcgttttgcct

SEQ ID NO: 58 - DNA, 10095 bp, synthetic construct; identical to SEQ ID NO: 56
  misc_feature 1..10095: note = Synthetic: RMP005-huCD33tPA (EF1a-hCD33-RMP5)
  source 1..10095: mol_type = other DNA

SEQ ID NO: 59 - DNA, 10101 bp, synthetic construct; identical to SEQ ID NO: 57
  misc_feature 1..10101: note = Synthetic: RMP005-huCD33tPA-AA
  source 1..10101: mol_type = other DNA

SEQ ID NO: 60 - DNA, 10092 bp, synthetic construct
  misc_feature 1..10092: note = Synthetic: RMP005-Secrecon(EF1a-Secrecon-RMP5)
  source 1..10092: mol_type = other DNA
gtactgggtctctctggttagaccagatctgagcctgggagctctctggctaactagggaacccactgcttaagcctcaataaagcttgccttgagtgcttcaagtagtgtgtgcccgtctgttgtgtgactctggtaactagagatccctcagacccttttagtcagtgtggaaaatctctagcagtggcgcccgaacagggacttgaaagcgaaagggaaaccagaggagctctctcgacgcaggactcggcttgctgaagcgcgcacggcaagaggcgaggggcggcgactggtgagtacgccaaaaattttgactagcggaggctagaaggagagagatgggtgcgagagcgtcagtattaagcgggggagaattagatcgcgatgggaaaaaattcggttaaggccagggggaaagaaaaaatataaattaaaacatatagtatgggcaagcagggagctagaacgattcgcagttaatcctggcctgttagaaacatcagaaggctgtagacaaatactgggacagctacaaccatcccttcagacaggatcagaagaacttagatcattatataatacagtagcaaccctctattgtgtgcatcaaaggatagagataaaagacaccaaggaagctttagacaagatagaggaagagcaaaacaaaagtaagaccaccgcacagcaagcggccgctgatcttcagacctggaggaggagatatgagggacaattggagaagtgaattatataaatataaagtagtaaaaattgaaccattaggagtagcacccaccaaggcaaagagaagagtggtgcagagagaaaaaagagcagtgggaataggagctttgttccttgggttcttgggagcagcaggaagcactatgggcgcagcgtcaatgacgctgacggtacaggccagacaattattgtctggtatagtgcagcagcagaacaatttgctgagggctattgaggcgcaacagcatctgttgcaactcacagtctggggcatcaagcagctccaggcaagaatcctggctgtggaaagatacctaaaggatcaacagctcctggggatttggggttgctctggaaaactcatttgcaccactgctgtgccttggaatgctagttggagtaataaatctctggaacagatttggaatcacacgacctggatggagtgggacagagaaattaacaattacacaagcttaatacactccttaattgaagaatcgcaaaaccagcaagaaaagaatgaacaagaattattggaattagataaatgggcaagtttgtggaattggtttaacataacaaattggctgtggtatataaaattattcataatgatagtaggaggcttggtaggtttaagaatagtttttgctgtactttctatagtgaatagagttaggcagggatattcaccattatcgtttcagacccacctcccaaccccgaggggacccgacaggcccgaaggaatagaagaagaaggtggagagagagacagagacagatccattcgattagtgaacggatcggcactgcgtgcgccaattctgcagacaaatggcagtattcatccacaattttaaaagaaaaggggggattggggggtacagtgcaggggaaagaatagtagacataatagcaacagacatacaaactaaagaattacaaaaacaaattacaaaaattcaaaattttcgggtttattacagggacagcagagatccagtttggttaattaaggatctgcgatcgctccggtgcccgtcagtgggcagagcgcacatcgcccacagtccccgagaagttggggggaggggtcggcaattgaaccggtgcctagagaaggtggcgcggggtaaactgggaaagtgatgtcgtgtactggctccgcctttttcccgagggtgggggagaaccgtatataagtgcagtagtcgccgtgaacgttctttttcgcaacgggtttgccgccagaacacagctgaagcttcgaggggctcgcatctctccttcacgcgcccgccgccctacctgaggccgccatccacgccggttgagtcgcgttctgccgcctcccgcctgtggtgcctcctgaactgcgtccgccgtctaggtaagtttaaagctcaggtcgagaccgggcctttgtccggcgctcccttggagcctacctagactcagccggctctccacgctttgcctgaccctgcttgctcaactctacgtctttgtttcgttttctgttctgcgccgttacagatccaagctgtgaccggcgcctaggatccccgggtaccggtcgtacgttcgaagctagcatgtggtggaggctgtggtggcttttgctgctgctcctgctcctgtggccgatggtatgggcgcttgtccctgaaaaggagaaggaccccaaatattggagagaccaggctcaggaaaccctcaagtacgctcttgaactgcaaaagcttaatactaacgtggctaaaaacgtgataatgttcttgggggacggaatgggggtttcaaccgttaccgcggccagaatcttgaaagggcagctgcaccataacccaggcgaagaaacgaggctggagatggacaaatttccattcgtggcgctttctaagacctacaacactaacgcccaggtccctgactcagctggtacggccactgcctacctttgtggagtgaaggcaaatgaggggactgttggtgtttccgcagctactgagagatctcggtgtaatacgactcaaggtaatgaagttacatccatactccgatgggcaaaagacgcgggcaaatctgttgggattgttacaactactagggtgaaccatgcgacaccctctgcagcttatgcgcacagtgccgaccgagactggtattcagataatgagatgccacccgaggcccttagccagggctgcaaggacatagcctatcaattgatgcacaatatcagagacatagacgttataatgggtggtggtcgcaagtacatgtaccccaaaaacaaaaccgacgtagagtatgaatccgatgaaaaagctaggggcaccagactcgacggacttgatctggttgatacatggaaatcctttaaacctcggtataagcattcacatttcatctggaacaggaccgaacttctcacattggacccccacaatgttgactatctcctcggtttgtttgaaccaggggatatgcagtatgagctcaatcggaacaacgtcactgaccccagtttgagtgaaatggtcgttgttgcaatacaaattttgaggaaaaatccaaaggggtttttcttgttggtagagggcggacggatagatcacgggcaccacgaaggcaaagcaaaacaggccctgcacgaagccgttgaaatggatcgcgctatcggtcaagccggctccctgacgagtagtgaagataccttgaccgtcgtcactgcggatcatagccacgtttttacctttgggggatacacccccaggggcaactcaatttttggacttgcaccgatgctcagcgacacagataaaaagccttttactgcgattctgtatggcaacggccctggatacaaagtagtagggggtgaaagggaaaacgtcagcatggtggactatgcacacaataattatcaggcgcagtccgctgttccgctgcggcatgagactcacgggggagaggacgttgctgtcttttccaagggaccaatggctcatcttctccatggagtccatgagcaaaattatgtccctcatgtcatggcatacgctgcatgtataggagcaaatctcgggcactgtgcaccggcgtcctccgattccagcgacagttcagacagctctgacagctccgattcctccgactcaagttgagaattcgatatcaagcttatcgataatcaacctctggattacaaaatttgtgaaagattgactggtattcttaactatgttgctccttttacgctatgtggatacgctgctttaatgcctttgtatcatgctattgcttcccgtatggctttcattttctcctccttgtataaatcctggttgctgtctctttatgaggagttgtggcccgttgtcaggcaacgtggcgtggtgtgcactgtgtttgctgacgcaacccccactggttggggcattgccaccacctgtcagctcctttccgggactttcgctttccccctccctattgccacggcggaactcatcgccgcctgccttgcccgctgctggacaggggctcggctgttgggcactgacaattccgtggtgttgtcggggaaatcatcgtcctttccttggctgctcgcctgtgttgccacctggattctgcgcgggacgtccttctgctacgtcccttcggccctcaatccagcggaccttccttcccgcggcctgctgccggctctgcggcctcttccgcgtcttcgccttcgccctcagacgagtcggatctccctttgggccgcctccccgcatcgataccgtcgacctcgatcgagacctagaaaaacatggagcaatcacaagtagcaatacagcagctaccaatgctgattgtgcctggctagaagcacaagaggaggaggaggtgggttttccagtcacacctcaggtacctttaagaccaatgacttacaaggcagctgtagatcttagccactttttaaaagaaaaggggggactggaagggctaattcactcccaacgaagacaagatatccttgatctgtggatctaccacacacaaggctacttccctgattggcagaactacacaccagggccagggatcagatatccactgacctttggatggtgctacaagctagtaccagttgagcaagagaaggtagaagaagccaatgaaggagagaacacccgcttgttacaccctgtgagcctgcatgggatggatgacccggagagagaagtattagagtggaggtttgacagccgcctagcatttcatcacatggcccgagagctgcatccggactgtactgggtctctctggttagaccagatctgagcctgggagctctctggctaactagggaacccactgcttaagcctcaataaagcttgccttgagtgcttcaagtagtgtgtgcccgtctgttgtgtgactctggtaactagagatccctcagacccttttagtcagtgtggaaaatctctagcagggcccgtttaaacccgctgatcagcctcgactgtgccttctagttgccagccatctgttgtttgcccctcccccgtgccttccttgaccctggaaggtgccactcccactgtcctttcctaataaaatgaggaaattgcatcgcattgtctgagtaggtgtcattctattctggggggtggggtggggcaggacagcaagggggaggattgggaagacaatagcaggcatgctggggatgcggtgggctctatggcttctgaggcggaaagaaccagctggggctctagggggtatccccacgcgccctgtagcggcgcattaagcgcggcgggtgtggtggttacgcgcagcgtgaccgctacacttgccagcgccctagcgcccgctcctttcgctttcttcccttcctttctcgccacgttcgccggctttccccgtcaagctctaaatcgggggctccctttagggttccgatttagtgctttacggcacctcgaccccaaaaaacttgattagggtgatggttcacgtagtgggccatcgccctgatagacggtttttcgccctttgacgttggagtccacgttctttaatagtggactcttgttccaaactggaacaacactcaaccctatctcggtctattcttttgatttataagggattttgccgatttcggcctattggttaaaaaatgagctgatttaacaaaaatttaacgcgaattaattctgtggaatgtgtgtcagttagggtgtggaaagtccccaggctccccagcaggcagaagtatgcaaagcatgcatctcaattagtcagcaaccaggtgtggaaagtccccaggctccccagcaggcagaagtatgcaaagcatgcatctcaattagtcagcaaccatagtcccgcccctaactccgcccatcccgcccctaactccgcccagttccgcccattctccgccccatggctgactaattttttttatttatgcagaggccgaggccgcctctgcctctgagctattccagaagtagtgaggaggcttttttggaggcctaggcttttgcaaaaagctcccgggagcttgtatatccattttcggatctgatcagcacgtgttgacaattaatcatcggcatagtatatcggcatagtataatacgacaaggtgaggaactaaaccatggccaagttgaccagtgccgttccggtgctcaccgcgcgcgacgtcgccggagcggtcgagttctggaccgaccggctcgggttctcccgggacttcgtggaggacgacttcgccggtgtggtccgggacgacgtgaccctgttcatcagcgcggtccaggaccaggtggtgccggacaacaccctggcctgggtgtgggtgcgcggcctggacgagctgtacgccgagtggtcggaggtcgtgtccacgaacttccgggacgcctccgggccggccatgaccgagatcggcgagcagccgtgggggcgggagttcgccctgcgcgacccggccggcaactgcgtgcacttcgtggccgaggagcaggactgacacgtgctacgagatttcgattccaccgccgccttctatgaaaggttgggcttcggaatcgttttccgggacgccggctggatgatcctccagcgcggggatctcatgctggagttcttcgcccaccccaacttgtttattgcagcttataatggttacaaataaagcaatagcatcacaaatttcacaaataaagcatttttttcactgcattctagttgtggtttgtccaaactcatcaatgtatcttatcatgtctgtataccgtcgacctctagctagagcttggcgtaatcatggtcatagctgtttcctgtgtgaaattgttatccgctcacaattccacacaacatacgagccggaagcataaagtgtaaagcctggggtgcctaatgagtgagctaactcacattaattgcgttgcgctcactgcccgctttccagtcgggaaacctgtcgtgccagctgcattaatgaatcggccaacgcgcggggagaggcggtttgcgtattgggcgctcttccgcttcctcgctcactgactcgctgcgctcggtcgttcggctgcggcgagcggtatcagctcactcaaaggcggtaatacggttatccacagaatcaggggataacgcaggaaagaacatgtgagcaaaaggccagcaaaaggccaggaaccgtaaaaaggccgcgttgctggcgtttttccataggctccgcccccctgacgagcatcacaaaaatcgacgctcaagtcagaggtggcgaaacccgacaggactataaagataccaggcgtttccccctggaagctccctcgtgcgctctcctgttccgaccctgccgcttaccggatacctgtccgcctttctcccttcgggaagcgtggcgctttctcatagctcacgctgtaggtatctcagttcggtgtaggtcgttcgctccaagctgggctgtgtgcacgaaccccccgttcagcccgaccgctgcgccttatccggtaactatcgtcttgagtccaacccggtaagacacgacttatcgccactggcagcagccactggtaacaggattagcagagcgaggtatgtaggcggtgctacagagttcttgaagtggtggcctaactacggctacactagaagaacagtatttggtatctgcgctctgctgaagccagttaccttcggaaaaagagttggtagctcttgatccggcaaacaaaccaccgctggtagcggtggtttttttgtttgcaagcagcagattacgcgcagaaaaaaaggatctcaagaagatcctttgatcttttctacggggtctgacgctcagtggaacgaaaactcacgttaagggattttggtcatgagattatcaaaaaggatcttcacctagatccttttaaattaaaaatgaagttttaaatcaatctaaagtatatatgagtaaacttggtctgacagttaccaatgcttaatcagtgaggcacctatctcagcgatctgtctatttcgttcatccatagttgcctgactccccgtcgtgtagataactacgatacgggagggcttaccatctggccccagtgctgcaatgataccgcgagacccacgctcaccggctccagatttatcagcaataaaccagccagccggaagggccgagcgcagaagtggtcctgcaactttatccgcctccatccagtctattaattgttgccgggaagctagagtaagtagttcgccagttaatagtttgcgcaacgttgttgccattgctacaggcatcgtggtgtcacgctcgtcgtttggtatggcttcattcagctccggttcccaacgatcaaggcgagttacatgatcccccatgttgtgcaaaaaagcggttagctccttcggtcctccgatcgttgtcagaagtaagttggccgcagtgttatcactcatggttatggcagcactgcataattctcttactgtcatgccatccgtaagatgcttttctgtgactggtgagtactcaaccaagtcattctgagaatagtgtatgcggcgaccgagttgctcttgcccggcgtcaatacgggataataccgcgccacatagcagaactttaaaagtgctcatcattggaaaacgttcttcggggcgaaaactctcaaggatcttaccgctgttgagatccagttcgatgtaacccactcgtgcacccaactgatcttcagcatcttttactttcaccagcgtttctgggtgagcaaaaacaggaaggcaaaatgccgcaaaaaagggaataagggcgacacggaaatgttgaatactcatactcttcctttttcaatattattgaagcatttatcagggttattgtctcatgagcggatacatatttgaatgtatttagaaaaataaacaaataggggttccgcgcacatttccccgaaaagtgccacctgacgtcgacggatcgggagatctcccgatcccctatggtgcactctcagtacaatctgctctgatgccgcatagttaagccagtatctgctccctgcttgtgtgttggaggtcgctgagtagtgcgcgagcaaaatttaagctacaacaaggcaaggcttgaccgacaattgcatgaagaatctgcttagggttaggcgttttgcgctgcttcgcgatgtacgggccagatatacgcgttgacattgattattgactagttattaatagtaatcaattacggggtcattagttcatagcccatatatggagttccgcgttacataacttacggtaaatggcccgcctggctgaccgcccaacgacccccgcccattgacgtcaataatgacgtatgttcccatagtaacgccaatagggactttccattgacgtcaatgggtggagtatttacggtaaactgcccacttggcagtacatcaagtgtatcatatgccaagtacgccccctattgacgtcaatgacggtaaatggcccgcctggcattatgcccagtacatgaccttatgggactttcctacttggcagtacatctacgtattagtcatcgctattaccatggtgatgcggttttggcagtacatcaatgggcgtggatagcggtttgactcacggggatttccaagtctccaccccattgacgtcaatgggagtttgttttggcaccaaaatcaacgggactttccaaaatgtcgtaacaactccgccccattgacgcaaatgggcggtaggcgtgtacggtgggaggtctatataagcagcgcgttttgcct

SEQ ID NO: 61 - DNA, 10098 bp, synthetic construct
  misc_feature 1..10098: note = Synthetic: RMP005-Secrecon-AA (EF1a-Secrecon-AA-RMP5)
  source 1..10098: mol_type = other DNA
gtactgggtctctctggttagaccagatctgagcctgggagctctctggctaactagggaacccactgcttaagcctcaataaagcttgccttgagtgcttcaagtagtgtgtgcccgtctgttgtgtgactctggtaactagagatccctcagacccttttagtcagtgtggaaaatctctagcagtggcgcccgaacagggacttgaaagcgaaagggaaaccagaggagctctctcgacgcaggactcggcttgctgaagcgcgcacggcaagaggcgaggggcggcgactggtgagtacgccaaaaattttgactagcggaggctagaaggagagagatgggtgcgagagcgtcagtattaagcgggggagaattagatcgcgatgggaaaaaattcggttaaggccagggggaaagaaaaaatataaattaaaacatatagtatgggcaagcagggagctagaacgattcgcagttaatcctggcctgttagaaacatcagaaggctgtagacaaatactgggacagctacaaccatcccttcagacaggatcagaagaacttagatcattatataatacagtagcaaccctctattgtgtgcatcaaaggatagagataaaagacaccaaggaagctttagacaagatagaggaagagcaaaacaaaagtaagaccaccgcacagcaagcggccgctgatcttcagacctggaggaggagatatgagggacaattggagaagtgaattatataaatataaagtagtaaaaattgaaccattaggagtagcacccaccaaggcaaagagaagagtggtgcagagagaaaaaagagcagtgggaataggagctttgttccttgggttcttgggagcagcaggaagcactatgggcgcagcgtcaatgacgctgacggtacaggccagacaattattgtctggtatagtgcagcagcagaacaatttgctgagggctattgaggcgcaacagcatctgttgcaactcacagtctggggcatcaagcagctccaggcaagaatcctggctgtggaaagatacctaaaggatcaacagctcctggggatttggggttgctctggaaaactcatttgcaccactgctgtgccttggaatgctagttggagtaataaatctctggaacagatttggaatcacacgacctggatggagtgggacagagaaattaacaattacacaagcttaatacactccttaattgaagaatcgcaaaaccagcaagaaaagaatgaacaagaattattggaattagataaatgggcaagtttgtggaattggtttaacataacaaattggctgtggtatataaaattattcataatgatagtaggaggcttggtaggtttaagaatagtttttgctgtactttctatagtgaatagagttaggcagggatattcaccattatcgtttcagacccacctcccaaccccgaggggacccgacaggcccgaaggaatagaagaagaaggtggagagagagacagagacagatccattcgattagtgaacggatcggcactgcgtgcgccaattctgcagacaaatggcagtattcatccacaattttaaaagaaaaggggggattggggggtacagtgcaggggaaagaatagtagacataatagcaacagacatacaaactaaagaattacaaaaacaaattacaaaaattcaaaattttcgggtttattacagggacagcagagatccagtttggttaattaaggatctgcgatcgctccggtgcccgtcagtgggcagagcgcacatcgcccacagtccccgagaagttggggggaggggtcggcaattgaaccggtgcctagagaaggtggcgcggggtaaactgggaaagtgatgtcgtgtactggctccgcctttttcccgagggtgggggagaaccgtatataagtgcagtagtcgccgtgaacgttctttttcgcaacgggtttgccgccagaacacagctgaagcttcgaggggctcgcatctctccttcacgcgcccgccgccctacctgaggccgccatccacgccggttgagtcgcgttctgccgcctcccgcctgtggtgcctcctgaactgcgtccgccgtctaggtaagtttaaagctcaggtcgagaccgggcctttgtccggcgctcccttggagcctacctagactcagccggctctccacgctttgcctgaccctgcttgctcaactctacgtctttgtttcgttttctgttctgcgccgttacagatccaagctgtgaccggcgcctaggatccccgggtaccggtcgtacgttcgaagctagcatgtggtggaggctgtggtggcttttgctgctgctcctgctcctgtggccgatggtatgggcggccgcccttgtccctgaaaaggagaaggaccccaaatattggagagaccaggctcaggaaaccctcaagtacgctcttgaactgcaaaagcttaatactaacgtggctaaaaacgtgataatgttcttgggggacggaatgggggtttcaaccgttaccgcggccagaatcttgaaagggcagctgcaccataacccaggcgaagaaacgaggctggagatggacaaatttccattcgtggcgctttctaagacctacaacactaacgcccaggtccctgactcagctggtacggccactgcctacctttgtggagtgaaggcaaatgaggggactgttggtgtttccgcagctactgagagatctcggtgtaatacgactcaaggtaatgaagttacatccatactccgatgggcaaaagacgcgggcaaatctgttgggattgttacaactactagggtgaaccatgcgacaccctctgcagcttatgcgcacagtgccgaccgagactggtattcagataatgagatgccacccgaggcccttagccagggctgcaaggacatagcctatcaattgatgcacaatatcagagacatagacgttataatgggtggtggtcgcaagtacatgtaccccaaaaacaaaaccgacgtagagtatgaatccgatgaaaaagctaggggcaccagactcgacggacttgatctggttgatacatggaaatcctttaaacctcggtataagcattcacatttcatctggaacaggaccgaacttctcacattggacccccacaatgttgactatctcctcggtttgtttgaaccaggggatatgcagtatgagctcaatcggaacaacgtcactgaccccagtttgagtgaaatggtcgttgttgcaatacaaattttgaggaaaaatccaaaggggtttttcttgttggtagagggcggacggatagatcacgggcaccacgaaggcaaagcaaaacaggccctgcacgaagccgttgaaatggatcgcgctatcggtcaagccggctccctgacgagtagtgaagataccttgaccgtcgtcactgcggatcatagccacgtttttacctttgggggatacacccccaggggcaactcaatttttggacttgcaccgatgctcagcgacacagataaaaagccttttactgcgattctgtatggcaacggccctggatacaaagtagtagggggtgaaagggaaaacgtcagcatggtggactatgcacacaataattatcaggcgcagtccgctgttccgctgcggcatgagactcacgggggagaggacgttgctgtcttttccaagggaccaatggctcatcttctccatggagtccatgagcaaaattatgtccctcatgtcatggcatacgctgcatgtataggagcaaatctcgggcactgtgcaccggcgtcctccgattccagcgacagttcagacagctctgacagctccgattcctccgactcaagttgagaattcgatatcaagcttatcgataatcaacctctggattacaaaatttgtgaaagattgactggtattcttaactatgttgctccttttacgctatgtggatacgctgctttaatgcctttgtatcatgctattgcttcccgtatggctttcattttctcctccttgtataaatcctggttgctgtctctttatgaggagttgtggcccgttgtcaggcaacgtggcgtggtgtgcactgtgtttgctgacgcaacccccactggttggggcattgccaccacctgtcagctcctttccgggactttcgctttccccctccctattgccacggcggaactcatcgccgcctgccttgcccgctgctggacaggggctcggctgttgggcactgacaattccgtggtgttgtcggggaaatcatcgtcctttccttggctgctcgcctgtgttgccacctggattctgcgcgggacgtccttctgctacgtcccttcggccctcaatccagcggaccttccttcccgcggcctgctgccggctctgcggcctcttccgcgtcttcgccttcgccctcagacgagtcggatctccctttgggccgcctccccgcatcgataccgtcgacctcgatcgagacctagaaaaacatggagcaatcacaagtagcaatacagcagctaccaatgctgattgtgcctggctagaagcacaagaggaggaggaggtgggttttccagtcacacctcaggtacctttaagaccaatgacttacaaggcagctgtagatcttagccactttttaaaagaaaaggggggactggaagggctaattcactcccaacgaagacaagatatccttgatctgtggatctaccacacacaaggctacttccctgattggcagaactacacaccagggccagggatcagatatccactgacctttggatggtgctacaagctagtaccagttgagcaagagaaggtagaagaagccaatgaaggagagaacacccgcttgttacaccctgtgagcctgcatgggatggatgacccggagagagaagtattagagtggaggtttgacagccgcctagcatttcatcacatggcccgagagctgcatccggactgtactgggtctctctggttagaccagatctgagcctgggagctctctggctaactagggaacccactgcttaagcctcaataaagcttgccttgagtgcttcaagtagtgtgtgcccgtctgttgtgtgactctggtaactagagatccctcagacccttttagtcagtgtggaaaatctctagcagggcccgtttaaacccgctgatcagcctcgactgtgccttctagttgccagccatctgttgtttgcccctcccccgtgccttccttgaccctggaaggtgccactcccactgtcctttcctaataaaatgaggaaattgcatcgcattgtctgagtaggtgtcattctattctggggggtggggtggggcaggacagcaagggggaggattgggaagacaatagcaggcatgctggggatgcggtgggctctatggcttctgaggcggaaagaaccagctggggctctagggggtatccccacgcgccctgtagcggcgcattaagcgcggcgggtgtggtggttacgcgcagcgtgaccgctacacttgccagcgccctagcgcccgctcctttcgctttcttcccttcctttctcgccacgttcgccggctttccccgtcaagctctaaatcgggggctccctttagggttccgatttagtgctttacggcacctcgaccccaaaaaacttgattagggtgatggttcacgtagtgggccatcgccctgatagacggtttttcgccctttgacgttggagtccacgttctttaatagtggactcttgttccaaactggaacaacactcaaccctatctcggtctattcttttgatttataagggattttgccgatttcggcctattggttaaaaaatgagctgatttaacaaaaatttaacgcgaattaattctgtggaatgtgtgtcagttagggtgtggaaagtccccaggctccccagcaggcagaagtatgcaaagcatgcatctcaattagtcagcaaccaggtgtggaaagtccccaggctccccagcaggcagaagtatgcaaagcatgcatctcaattagtcagcaaccatagtcccgcccctaactccgcccatcccgcccctaactccgcccagttccgcccattctccgccccatggctgactaattttttttatttatgcagaggccgaggccgcctctgcctctgagctattccagaagtagtgaggaggcttttttggaggcctaggcttttgcaaaaagctcccgggagcttgtatatccattttcggatctgatcagcacgtgttgacaattaatcatcggcatagtatatcggcatagtataatacgacaaggtgaggaactaaaccatggccaagttgaccagtgccgttccggtgctcaccgcgcgcgacgtcgccggagcggtcgagttctggaccgaccggctcgggttctcccgggacttcgtggaggacgacttcgccggtgtggtccgggacgacgtgaccctgttcatcagcgcggtccaggaccaggtggtgccggacaacaccctggcctgggtgtgggtgcgcggcctggacgagctgtacgccgagtggtcggaggtcgtgtccacgaacttccgggacgcctccgggccggccatgaccgagatcggcgagcagccgtgggggcgggagttcgccctgcgcgacccggccggcaactgcgtgcacttcgtggccgaggagcaggactgacacgtgctacgagatttcgattccaccgccgccttctatgaaaggttgggcttcggaatcgttttccgggacgccggctggatgatcctccagcgcggggatctcatgctggagttcttcgcccaccccaacttgtttattgcagcttataatggttacaaataaagcaatagcatcacaaatttcacaaataaagcatttttttcactgcattctagttgtggtttgtccaaactcatcaatgtatcttatcatgtctgtataccgtcgacctctagctagagcttggcgtaatcatggtcatagctgtttcctgtgtgaaattgttatccgctcacaattccacacaacatacgagccggaagcataaagtgtaaagcctggggtgcctaatgagtgagctaactcacattaattgcgttgcgctcactgcccgctttccagtcgggaaacctgtcgtgccagctgcattaatgaatcggccaacgcgcggggagaggcggtttgcgtattgggcgctcttccgcttcctcgctcactgactcgctgcgctcggtcgttcggctgcggcgagcggtatcagctcactcaaaggcggtaatacggttatccacagaatcaggggataacgcaggaaagaacatgtgagcaaaaggccagcaaaaggccaggaaccgtaaaaaggccgcgttgctggcgtttttccataggctccgcccccctgacgagcatcacaaaaatcgacgctcaagtcagaggtggcgaaacccgacaggactataaagataccaggcgtttccccctggaagctccctcgtgcgctctcctgttccgaccctgccgcttaccggatacctgtccgcctttctcccttcgggaagcgtggcgctttctcatagctcacgctgtaggtatctcagttcggtgtaggtcgttcgctccaagctgggctgtgtgcacgaaccccccgttcagcccgaccgctgcgccttatccggtaactatcgtcttgagtccaacccggtaagacacgacttatcgccactggcagcagccactggtaacaggattagcagagcgaggtatgtaggcggtgctacagagttcttgaagtggtggcctaactacggctacactagaagaacagtatttggtatctgcgctctgctgaagccagttaccttcggaaaaagagttggtagctcttgatccggcaaacaaaccaccgctggtagcggtggtttttttgtttgcaagcagcagattacgcgcagaaaaaaaggatctcaagaagatcctttgatcttttctacggggtctgacgctcagtggaacgaaaactcacgttaagggattttggtcatgagattatcaaaaaggatcttcacctagatccttttaaattaaaaatgaagttttaaatcaatctaaagtatatatgagtaaacttggtctgacagttaccaatgcttaatcagtgaggcacctatctcagcgatctgtctatttcgttcatccatagttgcctgactccccgtcgtgtagataactacgatacgggagggcttaccatctggccccagtgctgcaatgataccgcgagacccacgctcaccggctccagatttatcagcaataaaccagccagccggaagggccgagcgcagaagtggtcctgcaactttatccgcctccatccagtctattaattgttgccgggaagctagagtaagtagttcgccagttaatagtttgcgcaacgttgttgccattgctacaggcatcgtggtgtcacgctcgtcgtttggtatggcttcattcagctccggttcccaacgatcaaggcgagttacatgatcccccatgttgtgcaaaaaagcggttagctccttcggtcctccgatcgttgtcagaagtaagttggccgcagtgttatcactcatggttatggcagcactgcataattctcttactgtcatgccatccgtaagatgcttttctgtgactggtgagtactcaaccaagtcattctgagaatagtgtatgcggcgaccgagttgctcttgcccggcgtcaatacgggataataccgcgccacatagcagaactttaaaagtgctcatcattggaaaacgttcttcggggcgaaaactctcaaggatcttaccgctgttgagatccagttcgatgtaacccactcgtgcacccaactgatcttcagcatcttttactttcaccagcgtttctgggtgagcaaaaacaggaaggcaaaatgccgcaaaaaagggaataagggcgacacggaaatgttgaatactcatactcttcctttttcaatattattgaagcatttatcagggttattgtctcatgagcggatacatatttgaatgtatttagaaaaataaacaaataggggttccgcgcacatttccccgaaaagtgccacctgacgtcgacggatcgggagatctcccgatcccctatggtgcactctcagtacaatctgctctgatgccgcatagttaagccagtatctgctccctgcttgtgtgttggaggtcgctgagtagtgcgcgagcaaaatttaagctacaacaaggcaaggcttgaccgacaattgcatgaagaatctgcttagggttaggcgttttgcgctgcttcgcgatgtacgggccagatatacgcgttgacattgattattgactagttattaatagtaatcaattacggggtcattagttcatagcccatatatggagttccgcgttacataacttacggtaaatggcccgcctggctgaccgcccaacgacccccgcccattgacgtcaataatgacgtatgttcccatagtaacgccaatagggactttccattgacgtcaatgggtggagtatttacggtaaactgcccacttggcagtacatcaagtgtatcatatgccaagtacgccccctattgacgtcaatgacggtaaatggcccgcctggcattatgcccagtacatgaccttatgggactttcctacttggcagtacatctacgtattagtcatcgctattaccatggtgatgcggttttggcagtacatcaatgggcgtggatagcggtttgactcacggggatttccaagtctccaccccattgacgtcaatgggagtttgttttggcaccaaaatcaacgggactttccaaaatgtcgtaacaactccgccccattgacgcaaatgggcggtaggcgtgtacggtgggaggtctatataagcagcgcgttttgcct

SEQ ID NO: 62 - DNA, 10089 bp, synthetic construct
  misc_feature 1..10089: note = Synthetic: RMP005-mIgKVII,I EF1a-mIgKVIII-AA-RMP5 (EF1a-mIgKVIII-AA-RMP5)
  source 1..10089: mol_type = other DNA
gtactgggtctctctggttagaccagatctgagcctgggagctctctggctaactagggaacccactgcttaagcctcaataaagcttgccttgagtgcttcaagtagtgtgtgcccgtctgttgtgtgactctggtaactagagatccctcagacccttttagtcagtgtggaaaatctctagcagtggcgcccgaacagggacttgaaagcgaaagggaaaccagaggagctctctcgacgcaggactcggcttgctgaagcgcgcacggcaagaggcgaggggcggcgactggtgagtacgccaaaaattttgactagcggaggctagaaggagagagatgggtgcgagagcgtcagtattaagcgggggagaattagatcgcgatgggaaaaaattcggttaaggccagggggaaagaaaaaatataaattaaaacatatagtatgggcaagcagggagctagaacgattcgcagttaatcctggcctgttagaaacatcagaaggctgtagacaaatactgggacagctacaaccatcccttcagacaggatcagaagaacttagatcattatataatacagtagcaaccctctattgtgtgcatcaaaggatagagataaaagacaccaaggaagctttagacaagatagaggaagagcaaaacaaaagtaagaccaccgcacagcaagcggccgctgatcttcagacctggaggaggagatatgagggacaattggagaagtgaattatataaatataaagtagtaaaaattgaaccattaggagtagcacccaccaaggcaaagagaagagtggtgcagagagaaaaaagagcagtgggaataggagctttgttccttgggttcttgggagcagcaggaagcactatgggcgcagcgtcaatgacgctgacggtacaggccagacaattattgtctggtatagtgcagcagcagaacaatttgctgagggctattgaggcgcaacagcatctgttgcaactcacagtctggggcatcaagcagctccaggcaagaatcctggctgtggaaagatacctaaaggatcaacagctcctggggatttggggttgctctggaaaactcatttgcaccactgctgtgccttggaatgctagttggagtaataaatctctggaacagatttggaatcacacgacctggatggagtgggacagagaaattaacaattacacaagcttaatacactccttaattgaagaatcgcaaaaccagcaagaaaagaatgaacaagaattattggaattagataaatgggcaagtttgtggaattggtttaacataacaaattggctgtggtatataaaattattcataatgatagtaggaggcttggtaggtttaagaatagtttttgctgtactttctatagtgaatagagttaggcagggatattcaccattatcgtttcagacccacctcccaaccccgaggggacccgacaggcccgaaggaatagaagaagaaggtggagagagagacagagacagatccattcgattagtgaacggatcggcactgcgtgcgccaattctgcagacaaatggcagtattcatccacaattttaaaagaaaaggggggattggggggtacagtgcaggggaaagaatagtagacataatagcaacagacatacaaactaaagaattacaaaaacaaattacaaaaattcaaaattttcgggtttattacagggacagcagagatccagtttggttaattaaggatctgcgatcgctccggtgcccgtcagtgggcagagcgcacatcgcccacagtccccgagaagttggggggaggggtcggcaattgaaccggtgcctagagaaggtggcgcggggtaaactgggaaagtgatgtcgtgtactggctccgcctttttcccgagggtgggggagaaccgtatataagtgcagtagtcgccgtgaacgttctttttcgcaacgggtttgccgccagaacacagctgaagcttcgaggggctcgcatctctccttcacgcgcccgccgccctacctgaggccgccatccacgccggttgagtcgcgttctgccgcctcccgcctgtggtgcctcctgaactgcgtccgccgtctaggtaagtttaaagctcaggtcgagaccgggcctttgtccggcgctcccttggagcctacctagactcagccggctctccacgctttgcctgaccctgcttgctcaactctacgtctttgtttcgttttctgttctgcgccgttacagatccaagctgtgaccggcgcctaggatccccgggtaccggtcgtacgttcgaagctagcatggaaacggatacccttttgctgtgggttctgctcttgtgggtcccaggttccaccggacttgtccctgaaaaggagaaggaccccaaatattggagagaccaggctcaggaaaccctcaagtacgctcttgaactgcaaaagcttaatactaacgtggctaaaaacgtgataatgttcttgggggacggaatgggggtttcaaccgttaccgcggccagaatcttgaaagggcagctgcaccataacccaggcgaagaaacgaggctggagatggacaaatttccattcgtggcgctttctaagacctacaacactaacgcccaggtccctgactcagctggtacggccactgcctacctttgtggagtgaaggcaaatgaggggactgttggtgtttccgcagctactgagagatctcggtgtaatacgactcaaggtaatgaagttacatccatactccgatgggcaaaagacgcgggcaaatctgttgggattgttacaactactagggtgaaccatgcgacaccctctgcagcttatgcgcacagtgccgaccgagactggtattcagataatgagatgccacccgaggcccttagccagggctgcaaggacatagcctatcaattgatgcacaatatcagagacatagacgttataatgggtggtggtcgcaagtacatgtaccccaaaaacaaaaccgacgtagagtatgaatccgatgaaaaagctaggggcaccagactcgacggacttgatctggttgatacatggaaatcctttaaacctcggtataagcattcacatttcatctggaacaggaccgaacttctcacattggacccccacaatgttgactatctcctcggtttgtttgaaccaggggatatgcagtatgagctcaatcggaacaacgtcactgaccccagtttgagtgaaatggtcgttgttgcaatacaaattttgaggaaaaatccaaaggggtttttcttgttggtagagggcggacggatagatcacgggcaccacgaaggcaaagcaaaacaggccctgcacgaagccgttgaaatggatcgcgctatcggtcaagccggctccctgacgagtagtgaagataccttgaccgtcgtcactgcggatcatagccacgtttttacctttgggggatacacccccaggggcaactcaatttttggacttgcaccgatgctcagcgacacagataaaaagccttttactgcgattctgtatggcaacggccctggatacaaagtagtagggggtgaaagggaaaacgtcagcatggtggactatgcacacaataattatcaggcgcagtccgctgttccgctgcggcatgagactcacgggggagaggacgttgctgtcttttccaagggaccaatggctcatcttctccatggagtccatgagcaaaattatgtccctcatgtcatggcatacgctgcatgtataggagcaaatctcgggcactgtgcaccggcgtcctccgattccagcgacagttcagacagctctgacagctccgattcctccgactcaagttgagaattcgatatcaagcttatcgataatcaacctctggattacaaaatttgtgaaagattgactggtattcttaactatgttgctccttttacgctatgtggatacgctgctttaatgcctttgtatcatgctattgcttcccgtatggctttcattttctcctccttgtataaatcctggttgctgtctctttatgaggagttgtggcccgttgtcaggcaacgtggcgtggtgtgcactgtgtttgctgacgcaacccccactggttggggcattgccaccacctgtcagctcctttccgggactttcgctttccccctccctattgccacggcggaactcatcgccgcctgccttgcccgctgctggacaggggctcggctgttgggcactgacaattccgtggtgttgtcggggaaatcatcgtcctttccttggctgctcgcctgtgttgccacctggattctgcgcgggacgtccttctgctacgtcccttcggccctcaatccagcggaccttccttcccgcggcctgctgccggctctgcggcctcttccgcgtcttcgccttcgccctcagacgagtcggatctccctttgggccgcctccccgcatcgataccgtcgacctcgatcgagacctagaaaaacatggagcaatcacaagtagcaatacagcagctaccaatgctgattgtgcctggctagaagcacaagaggaggaggaggtgggttttccagtcacacctcaggtacctttaagaccaatgacttacaaggcagctgtagatcttagccactttttaaaagaaaaggggggactggaagggctaattcactcccaacgaagacaagatatccttgatctgtggatctaccacacacaaggctacttccctgattggcagaactacacaccagggccagggatcagatatccactgacctttggatggtgctacaagctagtaccagttgagcaagagaaggtagaagaagccaatgaaggagagaacacccgcttgttacaccctgtgagcctgcatgggatggatgacccggagagagaagtattagagtggaggtttgacagccgcctagcatttcatcacatggcccgagagctgcatccggactgtactgggtctctctggttagaccagatctgagcctgggagctctctggctaactagggaacccactgcttaagcctcaataaagcttgccttgagtgcttcaagtagtgtgtgcccgtctgttgtgtgactctggtaactagagatccctcagacccttttagtcagtgtggaaaatctctagcagggcccgtttaaacccgctgatcagcctcgactgtgccttctagttgccagccatctgttgtttgcccctcccccgtgccttccttgaccctggaaggtgccactcccactgtcctttcctaataaaatgaggaaattgcatcgcattgtctgagtaggtgtcattctattctggggggtggggtggggcaggacagcaagggggaggattgggaagacaatagcaggcatgctggggatgcggtgggctctatggcttctgaggcggaaagaaccagctggggctctagggggtatccccacgcgccctgtagcggcgcattaagcgcggcgggtgtggtggttacgcgcagcgtgaccgctacacttgccagcgccctagcgcccgctcctttcgctttcttcccttcctttctcgccacgttcgccggctttccccgtcaagctctaaatcgggggctccctttagggttccgatttagtgctttacggcacctcgaccccaaaaaacttgattagggtgatggttcacgtagtgggccatcgccctgatagacggtttttcgccctttgacgttggagtccacgttctttaatagtggactcttgttccaaactggaacaacactcaaccctatctcggtctattcttttgatttataagggattttgccgatttcggcctattggttaaaaaatgagctgatttaacaaaaatttaacgcgaattaattctgtggaatgtgtgtcagttagggtgtggaaagtccccaggctccccagcaggcagaagtatgcaaagcatgcatctcaattagtcagcaaccaggtgtggaaagtccccaggctccccagcaggcagaagtatgcaaagcatgcatctcaattagtcagcaaccatagtcccgcccctaactccgcccatcccgcccctaactccgcccagttccgcccattctccgccccatggctgactaattttttttatttatgcagaggccgaggccgcctctgcctctgagctattccagaagtagtgaggaggcttttttggaggcctaggcttttgcaaaaagctcccgggagcttgtatatccattttcggatctgatcagcacgtgttgacaattaatcatcggcatagtatatcggcatagtataatacgacaaggtgaggaactaaaccatggccaagttgaccagtgccgttccggtgctcaccgcgcgcgacgtcgccggagcggtcgagttctggaccgaccggctcgggttctcccgggacttcgtggaggacgacttcgccggtgtggtccgggacgacgtgaccctgttcatcagcgcggtccaggaccaggtggtgccggacaacaccctggcctgggtgtgggtgcgcggcctggacgagctgtacgccgagtggtcggaggtcgtgtccacgaacttccgggacgcctccgggccggccatgaccgagatcggcgagcagccgtgggggcgggagttcgccctgcgcgacccggccggcaactgcgtgcacttcgtggccgaggagcaggactgacacgtgctacgagatttcgattccaccgccgccttctatgaaaggttgggcttcggaatcgttttccgggacgccggctggatgatcctccagcgcggggatctcatgctggagttcttcgcccaccccaacttgtttattgcagcttataatggttacaaataaagcaatagcatcacaaatttcacaaataaagcatttttttcactgcattctagttgtggtttgtccaaactcatcaatgtatcttatcatgtctgtataccgtcgacctctagctagagcttggcgtaatcatggtcatagctgtttcctgtgtgaaattgttatccgctcacaattccacacaacatacgagccggaagcataaagtgtaaagcctggggtgcctaatgagtgagctaactcacattaattgcgttgcgctcactgcccgctttccagtcgggaaacctgtcgtgccagctgcattaatgaatcggccaacgcgcggggagaggcggtttgcgtattgggcgctcttccgcttcctcgctcactgactcgctgcgctcggtcgttcggctgcggcgagcggtatcagctcactcaaaggcggtaatacggttatccacagaatcaggggataacgcaggaaagaacatgtgagcaaaaggccagcaaaaggccaggaaccgtaaaaaggccgcgttgctggcgtttttccataggctccgcccccctgacgagcatcacaaaaatcgacgctcaagtcagaggtggcgaaacccgacaggactataaagataccaggcgtttccccctggaagctccctcgtgcgctctcctgttccgaccctgccgcttaccggatacctgtccgcctttctcccttcgggaagcgtggcgctttctcatagctcacgctgtaggtatctcagttcggtgtaggtcgttcgctccaagctgggctgtgtgcacgaaccccccgttcagcccgaccgctgcgccttatccggtaactatcgtcttgagtccaacccggtaagacacgacttatcgccactggcagcagccactggtaacaggattagcagagcgaggtatgtaggcggtgctacagagttcttgaagtggtggcctaactacggctacactagaagaacagtatttggtatctgcgctctgctgaagccagttaccttcggaaaaagagttggtagctcttgatccggcaaacaaaccaccgctggtagcggtggtttttttgtttgcaagcagcagattacgcgcagaaaaaaaggatctcaagaagatcctttgatcttttctacggggtctgacgctcagtggaacgaaaactcacgttaagggattttggtcatgagattatcaaaaaggatcttcacctagatccttttaaattaaaaatgaagttttaaatcaatctaaagtatatatgagtaaacttggtctgacagttaccaatgcttaatcagtgaggcacctatctcagcgatctgtctatttcgttcatccatagttgcctgactccccgtcgtgtagataactacgatacgggagggcttaccatctggccccagtgctgcaatgataccgcgagacccacgctcaccggctccagatttatcagcaataaaccagccagccggaagggccgagcgcagaagtggtcctgcaactttatccgcctccatccagtctattaattgttgccgggaagctagagtaagtagttcgccagttaatagtttgcgcaacgttgttgccattgctacaggcatcgtggtgtcacgctcgtcgtttggtatggcttcattcagctccggttcccaacgatcaaggcgagttacatgatcccccatgttgtgcaaaaaagcggttagctccttcggtcctccgatcgttgtcagaagtaagttggccgcagtgttatcactcatggttatggcagcactgcataattctcttactgtcatgccatccgtaagatgcttttctgtgactggtgagtactcaaccaagtcattctgagaatagtgtatgcggcgaccgagttgctcttgcccggcgtcaatacgggataataccgcgccacatagcagaactttaaaagtgctcatcattggaaaacgttcttcggggcgaaaactctcaaggatcttaccgctgttgagatccagttcgatgtaacccactcgtgcacccaactgatcttcagcatcttttactttcaccagcgtttctgggtgagcaaaaacaggaaggcaaaatgccgcaaaaaagggaataagggcgacacggaaatgttgaatactcatactcttcctttttcaatattattgaagcatttatcagggttattgtctcatgagcggatacatatttgaatgtatttagaaaaataaacaaataggggttccgcgcacatttccccgaaaagtgccacctgacgtcgacggatcgggagatctcccgatcccctatggtgcactctcagtacaatctgctctgatgccgcatagttaagccagtatctgctccctgcttgtgtgttggaggtcgctgagtagtgcgcgagcaaaatttaagctacaacaaggcaaggcttgaccgacaattgcatgaagaatctgcttagggttaggcgttttgcgctgcttcgcgatgtacgggccagatatacgcgttgacattgattattgactagttattaatagtaatcaattacggggtcattagttcatagcccatatatggagttccgcgttacataacttacggtaaatggcccgcctggctgaccgcccaacgacccccgcccattgacgtcaataatgacgtatgttcccatagtaacgccaatagggactttccattgacgtcaatgggtggagtatttacggtaaactgcccacttggcagtacatcaagtgtatcatatgccaagtacgccccctattgacgtcaatgacggtaaatggcccgcctggcattatgcccagtacatgaccttatgggactttcctacttggcagtacatctacgtattagtcatcgctattaccatggtgatgcggttttggcagtacatcaatgggcgtggatagcggtttgactcacggggatttccaagtctccaccccattgacgtcaatgggagtttgttttggcaccaaaatcaacgggactttccaaaatgtcgtaacaactccgccccattgacgcaaatgggcggtaggcgtgtacggtgggaggtctatataagcagcgcgttttgcct

SEQ ID NO: 63 - DNA, 10095 bp, synthetic construct
  misc_feature 1..10095: note = Synthetic: RMP005-mIgKVIII-AA
  source 1..10095: mol_type = other DNA
gtactgggtctctctggttagaccagatctgagcctgggagctctctggctaactagggaacccactgcttaagcctcaataaagcttgccttgagtgcttcaagtagtgtgtgcccgtctgttgtgtgactctggtaactagagatccctcagacccttttagtcagtgtggaaaatctctagcagtggcgcccgaacagggacttgaaagcgaaagggaaaccagaggagctctctcgacgcaggactcggcttgctgaagcgcgcacggcaagaggcgaggggcggcgactggtgagtacgccaaaaattttgactagcggaggctagaaggagagagatgggtgcgagagcgtcagtattaagcgggggagaattagatcgcgatgggaaaaaattcggttaaggccagggggaaagaaaaaatataaattaaaacatatagtatgggcaagcagggagctagaacgattcgcagttaatcctggcctgttagaaacatcagaaggctgtagacaaatactgggacagctacaaccatcccttcagacaggatcagaagaacttagatcattatataatacagtagcaaccctctattgtgtgcatcaaaggatagagataaaagacaccaaggaagctttagacaagatagaggaagagcaaaacaaaagtaagaccaccgcacagcaagcggccgctgatcttcagacctggaggaggagatatgagggacaattggagaagtgaattatataaatataaagtagtaaaaattgaaccattaggagtagcacccaccaaggcaaagagaagagtggtgcagagagaaaaaagagcagtgggaataggagctttgttccttgggttcttgggagcagcaggaagcactatgggcgcagcgtcaatgacgctgacggtacaggccagacaattattgtctggtatagtgcagcagcagaacaatttgctgagggctattgaggcgcaacagcatctgttgcaactcacagtctggggcatcaagcagctccaggcaagaatcctggctgtggaaagatacctaaaggatcaacagctcctggggatttggggttgctctggaaaactcatttgcaccactgctgtgccttggaatgctagttggagtaataaatctctggaacagatttggaatcacacgacctggatggagtgggacagagaaattaacaattacacaagcttaatacactccttaattgaagaatcgcaaaaccagcaagaaaagaatgaacaagaattattggaattagataaatgggcaagtttgtggaattggtttaacataacaaattggctgtggtatataaaattattcataatgatagtaggaggcttggtaggtttaagaatagtttttgctgtactttctatagtgaatagagttaggcagggatattcaccattatcgtttcagacccacctcccaaccccgaggggacccgacaggcccgaaggaatagaagaagaaggtggagagagagacagagacagatccattcgattagtgaacggatcggcactgcgtgcgccaattctgcagacaaatggcagtattcatccacaattttaaaagaaaaggggggattggggggtacagtgcaggggaaagaatagtagacataatagcaacagacatacaaactaaagaattacaaaaacaaattacaaaaattcaaaattttcgggtttattacagggacagcagagatccagtttggttaattaaggatctgcgatcgctccggtgcccgtcagtgggcagagcgcacatcgcccacagtccccgagaagttggggggaggggtcggcaattgaaccggtgcctagagaaggtggcgcggggtaaactgggaaagtgatgtcgtgtactggctccgcctttttcccgagggtgggggagaaccgtatataagtgcagtagtcgccgtgaacgttctttttcgcaacgggtttgccgccagaacacagctgaagcttcgaggggctcgcatctctccttcacgcgcccgccgccctacctgaggccgccatccacgccggttgagtcgcgttctgccgcctcccgcctgtggtgcctcctgaactgcgtccgccgtctaggtaagtttaaagctcaggtcgagaccgggcctttgtccggcgctcccttggagcctacctagactcagccggctctccacgctttgcctgaccctgcttgctcaactctacgtctttgtttcgttttctgttctgcgccgttacagatccaagctgtgaccggcgcctaggatccccgggtaccggtcgtacgttcgaagctagcatggaaacggatacccttttgctgtgggttctgctcttgtgggtcccaggttccaccggagcagcgcttgtccctgaaaaggagaaggaccccaaatattggagagaccaggctcaggaaaccctcaagtacgctcttgaactgcaaaagcttaatactaacgtggctaaaaacgtgataatgttcttgggggacggaatgggggtttcaaccgttaccgcggccagaatcttgaaagggcagctgcaccataacccaggcgaagaaacgaggctggagatggacaaatttccattcgtggcgctttctaagacctacaacactaacgcccaggtccctgactcagctggtacggccactgcctacctttgtggagtgaaggcaaatgaggggactgttggtgtttccgcagctactgagagatctcggtgtaatacgactcaaggtaatgaagttacatccatactccgatgggcaaaagacgcgggcaaatctgttgggattgttacaactactagggtgaaccatgcgacaccctctgcagcttatgcgcacagtgccgaccgagactggtattcagataatgagatgccacccgaggcccttagccagggctgcaaggacatagcctatcaattgatgcacaatatcagagacatagacgttataatgggtggtggtcgcaagtacatgtaccccaaaaacaaaaccgacgtagagtatgaatccgatgaaaaagctaggggcaccagactcgacggacttgatctggttgatacatggaaatcctttaaacctcggtataagcattcacatttcatctggaacaggaccgaacttctcacattggacccccacaatgttgactatctcctcggtttgtttgaaccaggggatatgcagtatgagctcaatcggaacaacgtcactgaccccagtttgagtgaaatggtcgttgttgcaatacaaattttgaggaaaaatccaaaggggtttttcttgttggtagagggcggacggatagatcacgggcaccacgaaggcaaagcaaaacaggccctgcacgaagccgttgaaatggatcgcgctatcggtcaagccggctccctgacgagtagtgaagataccttgaccgtcgtcactgcggatcatagccacgtttttacctttgggggatacacccccaggggcaactcaatttttggacttgcaccgatgctcagcgacacagataaaaagccttttactgcgattctgtatggcaacggccctggatacaaagtagtagggggtgaaagggaaaacgtcagcatggtggactatgcacacaataattatcaggcgcagtccgctgttccgctgcggcatgagactcacgggggagaggacgttgctgtcttttccaagggaccaatggctcatcttctccatggagtccatgagcaaaattatgtccctcatgtcatggcatacgctgcatgtataggagcaaatctcgggcactgtgcaccggcgtcctccgattccagcgacagttcagacagctctgacagctccgattcctccgactcaagttgagaattcgatatcaagcttatcgataatcaacctctggattacaaaatttgtgaaagattgactggtattcttaactatgttgctccttttacgctatgtggatacgctgctttaatgcctttgtatcatgctattgcttcccgtatggctttcattttctcctccttgtataaatcctggttgctgtctctttatgaggagttgtggcccgttgtcaggcaacgtggcgtggtgtgcactgtgtttgctgacgcaacccccactggttggggcattgccaccacctgtcagctcctttccgggactttcgctttccccctccctattgccacggcggaactcatcgccgcctgccttgcccgctgctggacaggggctcggctgttgggcactgacaattccgtggtgttgtcggggaaatcatcgtcctttccttggctgctcgcctgtgttgccacctggattctgcgcgggacgtccttctgctacgtcccttcggccctcaatccagcggaccttccttcccgcggcctgctgccggctctgcggcctcttccgcgtcttcgccttcgccctcagacgagtcggatctccctttgggccgcctccccgcatcgataccgtcgacctcgatcgagacctagaaaaacatggagcaatcacaagtagcaatacagcagctaccaatgctgattgtgcctggctagaagcacaagaggaggaggaggtgggttttccagtcacacctcaggtacctttaagaccaatgacttacaaggcagctgtagatcttagccactttttaaaagaaaaggggggactggaagggctaattcactcccaacgaagacaagatatccttgatctgtggatctaccacacacaaggctacttccctgattggcagaactacacaccagggccagggatcagatatccactgacctttggatggtgctacaagctagtaccagttgagcaagagaaggtagaagaagccaatgaaggagagaacacccgcttgttacaccctgtgagcctgcatgggatggatgacccggagagagaagtattagagtggaggtttgacagccgcctagcatttcatcacatggcccgagagctgcatccggactgtactgggtctctctggttagaccagatctgagcctgggagctctctggctaactagggaacccactgcttaagcctcaataaagcttgccttgagtgcttcaagtagtgtgtgcccgtctgttgtgtgactctggtaactagagatccctcagacccttttagtcagtgtggaaaatctctagcagggcccgtttaaacccgctgatcagcctcgactgtgccttctagttgccagccatctgttgtttgcccctcccccgtgccttccttgaccctggaaggtgccactcccactgtcctttcctaataaaatgaggaaattgcatcgcattgtctgagtaggtgtcattctattctggggggtggggtggggcaggacagcaagggggaggattgggaagacaatagcaggcatgctggggatgcggtgggctctatggcttctgaggcggaaagaaccagctggggctctagggggtatccccacgcgccctgtagcggcgcattaagcgcggcgggtgtggtggttacgcgcagcgtgaccgctacacttgccagcgccctagcgcccgctcctttcgctttcttcccttcctttctcgccacgttcgccggctttccccgtcaagctctaaatcgggggctccctttagggttccgatttagtgctttacggcacctcgaccccaaaaaacttgattagggtgatggttcacgtagtgggccatcgccctgatagacggtttttcgccctttgacgttggagtccacgttctttaatagtggactcttgttccaaactggaacaacactcaaccctatctcggtctattcttttgatttataagggattttgccgatttcggcctattggttaaaaaatgagctgatttaacaaaaatttaacgcgaattaattctgtggaatgtgtgtcagttagggtgtggaaagtccccaggctccccagcaggcagaagtatgcaaagcatgcatctcaattagtcagcaaccaggtgtggaaagtccccaggctccccagcaggcagaagtatgcaaagcatgcatctcaattagtcagcaaccatagtcccgcccctaactccgcccatcccgcccctaactccgcccagttccgcccattctccgccccatggctgactaattttttttatttatgcagaggccgaggccgcctctgcctctgagctattccagaagtagtgaggaggcttttttggaggcctaggcttttgcaaaaagctcccgggagcttgtatatccattttcggatctgatcagcacgtgttgacaattaatcatcggcatagtatatcggcatagtataatacgacaaggtgaggaactaaaccatggccaagttgaccagtgccgttccggtgctcaccgcgcgcgacgtcgccggagcggtcgagttctggaccgaccggctcgggttctcccgggacttcgtggaggacgacttcgccggtgtggtccgggacgacgtgaccctgttcatcagcgcggtccaggaccaggtggtgccggacaacaccctggcctgggtgtgggtgcgcggcctggacgagctgtacgccgagtggtcggaggtcgtgtccacgaacttccgggacgcctccgggccggccatgaccgagatcggcgagcagccgtgggggcgggagttcgccctgcgcgacccggccggcaactgcgtgcacttcgtggccgaggagcaggactgacacgtgctacgagatttcgattccaccgccgccttctatgaaaggttgggcttcggaatcgttttccgggacgccggctggatgatcctccagcgcggggatctcatgctggagttcttcgcccaccccaacttgtttattgcagcttataatggttacaaataaagcaatagcatcacaaatttcacaaataaagcatttttttcactgcattctagttgtggtttgtccaaactcatcaatgtatcttatcatgtctgtataccgtcgacctctagctagagcttggcgtaatcatggtcatagctgtttcctgtgtgaaattgttatccgctcacaattccacacaacatacgagccggaagcataaagtgtaaagcctggggtgcctaatgagtgagctaactcacattaattgcgttgcgctcactgcccgctttccagtcgggaaacctgtcgtgccagctgcattaatgaatcggccaacgcgcggggagaggcggtttgcgtattgggcgctcttccgcttcctcgctcactgactcgctgcgctcggtcgttcggctgcggcgagcggtatcagctcactcaaaggcggtaatacggttatccacagaatcaggggataacgcaggaaagaacatgtgagcaaaaggccagcaaaaggccaggaaccgtaaaaaggccgcgttgctggcgtttttccataggctccgcccccctgacgagcatcacaaaaatcgacgctcaagtcagaggtggcgaaacccgacaggactataaagataccaggcgtttccccctggaagctccctcgtgcgctctcctgttccgaccctgccgcttaccggatacctgtccgcctttctcccttcgggaagcgtggcgctttctcatagctcacgctgtaggtatctcagttcggtgtaggtcgttcgctccaagctgggctgtgtgcacgaaccccccgttcagcccgaccgctgcgccttatccggtaactatcgtcttgagtccaacccggtaagacacgacttatcgccactggcagcagccactggtaacaggattagcagagcgaggtatgtaggcggtgctacagagttcttgaagtggtggcctaactacggctacactagaagaacagtatttggtatctgcgctctgctgaagccagttaccttcggaaaaagagttggtagctcttgatccggcaaacaaaccaccgctggtagcggtggtttttttgtttgcaagcagcagattacgcgcagaaaaaaaggatctcaagaagatcctttgatcttttctacggggtctgacgctcagtggaacgaaaactcacgttaagggattttggtcatgagattatcaaaaaggatcttcacctagatccttttaaattaaaaatgaagttttaaatcaatctaaagtatatatgagtaaacttggtctgacagttaccaatgcttaatcagtgaggcacctatctcagcgatctgtctatttcgttcatccatagttgcctgactccccgtcgtgtagataactacgatacgggagggcttaccatctggccccagtgctgcaatgataccgcgagacccacgctcaccggctccagatttatcagcaataaaccagccagccggaagggccgagcgcagaagtggtcctgcaactttatccgcctccatccagtctattaattgttgccgggaagctagagtaagtagttcgccagttaatagtttgcgcaacgttgttgccattgctacaggcatcgtggtgtcacgctcgtcgtttggtatggcttcattcagctccggttcccaacgatcaaggcgagttacatgatcccccatgttgtgcaaaaaagcggttagctccttcggtcctccgatcgttgtcagaagtaagttggccgcagtgttatcactcatggttatggcagcactgcataattctcttactgtcatgccatccgtaagatgcttttctgtgactggtgagtactcaaccaagtcattctgagaatagtgtatgcggcgaccgagttgctcttgcccggcgtcaatacgggataataccgcgccacatagcagaactttaaaagtgctcatcattggaaaacgttcttcggggcgaaaactctcaaggatcttaccgctgttgagatccagttcgatgtaacccactcgtgcacccaactgatcttcagcatcttttactttcaccagcgtttctgggtgagcaaaaacaggaaggcaaaatgccgcaaaaaagggaataagggcgacacggaaatgttgaatactcatactcttcctttttcaatattattgaagcatttatcagggttattgtctcatgagcggatacatatttgaatgtatttagaaaaataaacaaataggggttccgcgcacatttccccgaaaagtgccacctgacgtcgacggatcgggagatctcccgatcccctatggtgcactctcagtacaatctgctctgatgccgcatagttaagccagtatctgctccctgcttgtgtgttggaggtcgctgagtagtgcgcgagcaaaatttaagctacaacaaggcaaggcttgaccgacaattgcatgaagaatctgcttagggttaggcgttttgcgctgcttcgcgatgtacgggccagatatacgcgttgacattgattattgactagttattaatagtaatcaattacggggtcattagttcatagcccatatatggagttccgcgttacataacttacggtaaatggcccgcctggctgaccgcccaacgacccccgcccattgacgtcaataatgacgtatgttcccatagtaacgccaatagggactttccattgacgtcaatgggtggagtatttacggtaaactgcccacttggcagtacatcaagtgtatcatatgccaagtacgccccctattgacgtcaatgacggtaaatggcccgcctggcattatgcccagtacatgaccttatgggactttcctacttggcagtacatctacgtattagtcatcgctattaccatggtgatgcggttttggcagtacatcaatgggcgtggatagcggtttgactcacggggatttccaagtctccaccccattgacgtcaatgggagtttgttttggcaccaaaatcaacgggactttccaaaatgtcgtaacaactccgccccattgacgcaaatgggcggtaggcgtgtacggtgggaggtctatataagcagcgcgttttgcct

SEQ ID NO: 64 - DNA, 10086 bp, synthetic construct
  misc_feature 1..10086: note = Synthetic: RMP005-Alpha-lactalbumin (EF1a-aLA-RMP5)
  source 1..10086: mol_type = other DNA
gtactgggtctctctggttagaccagatctgagcctgggagctctctggctaactagggaacccactgcttaagcctcaataaagcttgccttgagtgcttcaagtagtgtgtgcccgtctgttgtgtgactctggtaactagagatccctcagacccttttagtcagtgtggaaaatctctagcagtggcgcccgaacagggacttgaaagcgaaagggaaaccagaggagctctctcgacgcaggactcggcttgctgaagcgcgcacggcaagaggcgaggggcggcgactggtgagtacgccaaaaattttgactagcggaggctagaaggagagagatgggtgcgagagcgtcagtattaagcgggggagaattagatcgcgatgggaaaaaattcggttaaggccagggggaaagaaaaaatataaattaaaacatatagtatgggcaagcagggagctagaacgattcgcagttaatcctggcctgttagaaacatcagaaggctgtagacaaatactgggacagctacaaccatcccttcagacaggatcagaagaacttagatcattatataatacagtagcaaccctctattgtgtgcatcaaaggatagagataaaagacaccaaggaagctttagacaagatagaggaagagcaaaacaaaagtaagaccaccgcacagcaagcggccgctgatcttcagacctggaggaggagatatgagggacaattggagaagtgaattatataaatataaagtagtaaaaattgaaccattaggagtagcacccaccaaggcaaagagaagagtggtgcagagagaaaaaagagcagtgggaataggagctttgttccttgggttcttgggagcagcaggaagcactatgggcgcagcgtcaatgacgctgacggtacaggccagacaattattgtctggtatagtgcagcagcagaacaatttgctgagggctattgaggcgcaacagcatctgttgcaactcacagtctggggcatcaagcagctccaggcaagaatcctggctgtggaaagatacctaaaggatcaacagctcctggggatttggggttgctctggaaaactcatttgcaccactgctgtgccttggaatgctagttggagtaataaatctctggaacagatttggaatcacacgacctggatggagtgggacagagaaattaacaattacacaagcttaatacactccttaattgaagaatcgcaaaaccagcaagaaaagaatgaacaagaattattggaattagataaatgggcaagtttgtggaattggtttaacataacaaattggctgtggtatataaaattattcataatgatagtaggaggcttggtaggtttaagaatagtttttgctgtactttctatagtgaatagagttaggcagggatattcaccattatcgtttcagacccacctcccaaccccgaggggacccgacaggcccgaaggaatagaagaagaaggtggagagagagacagagacagatccattcgattagtgaacggatcggcactgcgtgcgccaattctgcagacaaatggcagtattcatccacaattttaaaagaaaaggggggattggggggtacagtgcaggggaaagaatagtagacataatagcaacagacatacaaactaaagaattacaaaaacaaattacaaaaattcaaaattttcgggtttattacagggacagcagagatccagtttggttaattaaggatctgcgatcgctccggtgcccgtcagtgggcagagcgcacatcgcccacagtccccgagaagttggggggaggggtcggcaattgaaccggtgcctagagaaggtggcgcggggtaaactgggaaagtgatgtcgtgtactggctccgcctttttcccgagggtgggggagaaccgtatataagtgcagtagtcgccgtgaacgttctttttcgcaacgggtttgccgccagaacacagctgaagcttcgaggggctcgcatctctccttcacgcgcccgccgccctacctgaggccgccatccacgccggttgagtcgcgttctgccgcctcccgcctgtggtgcctcctgaactgcgtccgccgtctaggtaagtttaaagctcaggtcgagaccgggcctttgtccggcgctcccttggagcctacctagactcagccggctctccacgctttgcctgaccctgcttgctcaactctacgtctttgtttcgttttctgttctgcgccgttacagatccaagctgtgaccggcgcctaggatccccgggtaccggtcgtacgttcgaagctagcatgatgtccttcgtgtctctgctccttgtagggattctttttcacgccactcaggctcttgtccctgaaaaggagaaggaccccaaatattggagagaccaggctcaggaaaccctcaagtacgctcttgaactgcaaaagcttaatactaacgtggctaaaaacgtgataatgttcttgggggacggaatgggggtttcaaccgttaccgcggccagaatcttgaaagggcagctgcaccataacccaggcgaagaaacgaggctggagatggacaaatttccattcgtggcgctttctaagacctacaacactaacgcccaggtccctgactcagctggtacggccactgcctacctttgtggagtgaaggcaaatgaggggactgttggtgtttccgcagctactgagagatctcggtgtaatacgactcaaggtaatgaagttacatccatactccgatgggcaaaagacgcgggcaaatctgttgggattgttacaactactagggtgaaccatgcgacaccctctgcagcttatgcgcacagtgccgaccgagactggtattcagataatgagatgccacccgaggcccttagccagggctgcaaggacatagcctatcaattgatgcacaatatcagagacatagacgttataatgggtggtggtcgcaagtacatgtaccccaaaaacaaaaccgacgtagagtatgaatccgatgaaaaagctaggggcaccagactcgacggacttgatctggttgatacatggaaatcctttaaacctcggtataagcattcacatttcatctggaacaggaccgaacttctcacattggacccccacaatgttgactatctcctcggtttgtttgaaccaggggatatgcagtatgagctcaatcggaacaacgtcactgaccccagtttgagtgaaatggtcgttgttgcaatacaaattttgaggaaaaatccaaaggggtttttcttgttggtagagggcggacggatagatcacgggcaccacgaaggcaaagcaaaacaggccctgcacgaagccgttgaaatggatcgcgctatcggtcaagccggctccctgacgagtagtgaagataccttgaccgtcgtcactgcggatcatagccacgtttttacctttgggggatacacccccaggggcaactcaatttttggacttgcaccgatgctcagcgacacagataaaaagccttttactgcgattctgtatggcaacggccctggatacaaagtagtagggggtgaaagggaaaacgtcagcatggtggactatgcacacaataattatcaggcgcagtccgctgttccgctgcggcatgagactcacgggggagaggacgttgctgtcttttccaagggaccaatggctcatcttctccatggagtccatgagcaaaattatgtccctcatgtcatggcatacgctgcatgtataggagcaaatctcgggcactgtgcaccggcgtcctccgattccagcgacagttcagacagctctgacagctccgattcctccgactcaagttgagaattcgatatcaagcttatcgataatcaacctctggattacaaaatttgtgaaagattgactggtattcttaactatgttgctccttttacgctatgtggatacgctgctttaatgcctttgtatcatgctattgcttcccgtatggctttcattttctcctccttgtataaatcctggttgctgtctctttatgaggagttgtggcccgttgtcaggcaacgtggcgtggtgtgcactgtgtttgctgacgcaacccccactggttggggcattgccaccacctgtcagctcctttccgggactttcgctttccccctccctattgccacggcggaactcatcgccgcctgccttgcccgctgctggacaggggctcggctgttgggcactgacaattccgtggtgttgtcggggaaatcatcgtcctttccttggctgctcgcctgtgttgccacctggattctgcgcgggacgtccttctgctacgtcccttcggccctcaatccagcggaccttccttcccgcggcctgctgccggctctgcggcctcttccgcgtcttcgccttcgccctcagacgagtcggatctccctttgggccgcctccccgcatcgataccgtcgacctcgatcgagacctagaaaaacatggagcaatcacaagtagcaatacagcagctaccaatgctgattgtgcctggctagaagcacaagaggaggaggaggtgggttttccagtcacacctcaggtacctttaagaccaatgacttacaaggcagctgtagatcttagccactttttaaaagaaaaggggggactggaagggctaattcactcccaacgaagacaagatatccttgatctgtggatctaccacacacaaggctacttccctgattggcagaactacacaccagggccagggatcagatatccactgacctttggatggtgctacaagctagtaccagttgagcaagagaaggtagaagaagccaatgaaggagagaacacccgcttgttacaccctgtgagcctgcatgggatggatgacccggagagagaagtattagagtggaggtttgacagccgcctagcatttcatcacatggcccgagagctgcatccggactgtactgggtctctctggttagaccagatctgagcctgggagctctctggctaactagggaacccactgcttaagcctcaataaagcttgccttgagtgcttcaagtagtgtgtgcccgtctgttgtgtgactctggtaactagagatccctcagacccttttagtcagtgtggaaaatctctagcagggcccgtttaaacccgctgatcagcctcgactgtgccttctagttgccagccatctgttgtttgcccctcccccgtgccttccttgaccctggaaggtgccactcccactgtcctttcctaataaaatgaggaaattgcatcgcattgtctgagtaggtgtcattctattctggggggtggggtggggcaggacagcaagggggaggattgggaagacaatagcaggcatgctggggatgcggtgggctctatggcttctgaggcggaaagaaccagctggggctctagggggtatccccacgcgccctgtagcggcgcattaagcgcggcgggtgtggtggttacgcgcagcgtgaccgctacacttgccagcgccctagcgcccgctcctttcgctttcttcccttcctttctcgccacgttcgccggctttccccgtcaagctctaaatcgggggctccctttagggttccgatttagtgctttacggcacctcgaccccaaaaaacttgattagggtgatggttcacgtagtgggccatcgccctgatagacggtttttcgccctttgacgttggagtccacgttctttaatagtggactcttgttccaaactggaacaacactcaaccctatctcggtctattcttttgatttataagggattttgccgatttcggcctattggttaaaaaatgagctgatttaacaaaaatttaacgcgaattaattctgtggaatgtgtgtcagttagggtgtggaaagtccccaggctccccagcaggcagaagtatgcaaagcatgcatctcaattagtcagcaaccaggtgtggaaagtccccaggctccccagcaggcagaagtatgcaaagcatgcatctcaattagtcagcaaccatagtcccgcccctaactccgcccatcccgcccctaactccgcccagttccgcccattctccgccccatggctgactaattttttttatttatgcagaggccgaggccgcctctgcctctgagctattccagaagtagtgaggaggcttttttggaggcctaggcttttgcaaaaagctcccgggagcttgtatatccattttcggatctgatcagcacgtgttgacaattaatcatcggcatagtatatcggcatagtataatacgacaaggtgaggaactaaaccatggccaagttgaccagtgccgttccggtgctcaccgcgcgcgacgtcgccggagcggtcgagttctggaccgaccggctcgggttctcccgggacttcgtggaggacgacttcgccggtgtggtccgggacgacgtgaccctgttcatcagcgcggtccaggaccaggtggtgccggacaacaccctggcctgggtgtgggtgcgcggcctggacgagctgtacgccgagtggtcggaggtcgtgtccacgaacttccgggacgcctccgggccggccatgaccgagatcggcgagcagccgtgggggcgggagttcgccctgcgcgacccggccggcaactgcgtgcacttcgtggccgaggagcaggactgacacgtgctacgagatttcgattccaccgccgccttctatgaaaggttgggcttcggaatcgttttccgggacgccggctggatgatcctccagcgcggggatctcatgctggagttcttcgcccaccccaacttgtttattgcagcttataatggttacaaataaagcaatagcatcacaaatttcacaaataaagcatttttttcactgcattctagttgtggtttgtccaaactcatcaatgtatcttatcatgtctgtataccgtcgacctctagctagagcttggcgtaatcatggtcatagctgtttcctgtgtgaaattgttatccgctcacaattccacacaacatacgagccggaagcataaagtgtaaagcctggggtgcctaatgagtgagctaactcacattaattgcgttgcgctcactgcccgctttccagtcgggaaacctgtcgtgccagctgcattaatgaatcggccaacgcgcggggagaggcggtttgcgtattgggcgctcttccgcttcctcgctcactgactcgctgcgctcggtcgttcggctgcggcgagcggtatcagctcactcaaaggcggtaatacggttatccacagaatcaggggataacgcaggaaagaacatgtgagcaaaaggccagcaaaaggccaggaaccgtaaaaaggccgcgttgctggcgtttttccataggctccgcccccctgacgagcatcacaaaaatcgacgctcaagtcagaggtggcgaaacccgacaggactataaagataccaggcgtttccccctggaagctccctcgtgcgctctcctgttccgaccctgccgcttaccggatacctgtccgcctttctcccttcgggaagcgtggcgctttctcatagctcacgctgtaggtatctcagttcggtgtaggtcgttcgctccaagctgggctgtgtgcacgaaccccccgttcagcccgaccgctgcgccttatccggtaactatcgtcttgagtccaacccggtaagacacgacttatcgccactggcagcagccactggtaacaggattagcagagcgaggtatgtaggcggtgctacagagttcttgaagtggtggcctaactacggctacactagaagaacagtatttggtatctgcgctctgctgaagccagttaccttcggaaaaagagttggtagctcttgatccggcaaacaaaccaccgctggtagcggtggtttttttgtttgcaagcagcagattacgcgcagaaaaaaaggatctcaagaagatcctttgatcttttctacggggtctgacgctcagtggaacgaaaactcacgttaagggattttggtcatgagattatcaaaaaggatcttcacctagatccttttaaattaaaaatgaagttttaaatcaatctaaagtatatatgagtaaacttggtctgacagttaccaatgcttaatcagtgaggcacctatctcagcgatctgtctatttcgttcatccatagttgcctgactccccgtcgtgtagataactacgatacgggagggcttaccatctggccccagtgctgcaatgataccgcgagacccacgctcaccggctccagatttatcagcaataaaccagccagccggaagggccgagcgcagaagtggtcctgcaactttatccgcctccatccagtctattaattgttgccgggaagctagagtaagtagttcgccagttaatagtttgcgcaacgttgttgccattgctacaggcatcgtggtgtcacgctcgtcgtttggtatggcttcattcagctccggttcccaacgatcaaggcgagttacatgatcccccatgttgtgcaaaaaagcggttagctccttcggtcctccgatcgttgtcagaagtaagttggccgcagtgttatcactcatggttatggcagcactgcataattctcttactgtcatgccatccgtaagatgcttttctgtgactggtgagtactcaaccaagtcattctgagaatagtgtatgcggcgaccgagttgctcttgcccggcgtcaatacgggataataccgcgccacatagcagaactttaaaagtgctcatcattggaaaacgttcttcggggcgaaaactctcaaggatcttaccgctgttgagatccagttcgatgtaacccactcgtgcacccaactgatcttcagcatcttttactttcaccagcgtttctgggtgagcaaaaacaggaaggcaaaatgccgcaaaaaagggaataagggcgacacggaaatgttgaatactcatactcttcctttttcaatattattgaagcatttatcagggttattgtctcatgagcggatacatatttgaatgtatttagaaaaataaacaaataggggttccgcgcacatttccccgaaaagtgccacctgacgtcgacggatcgggagatctcccgatcccctatggtgcactctcagtacaatctgctctgatgccgcatagttaagccagtatctgctccctgcttgtgtgttggaggtcgctgagtagtgcgcgagcaaaatttaagctacaacaaggcaaggcttgaccgacaattgcatgaagaatctgcttagggttaggcgttttgcgctgcttcgcgatgtacgggccagatatacgcgttgacattgattattgactagttattaatagtaatcaattacggggtcattagttcatagcccatatatggagttccgcgttacataacttacggtaaatggcccgcctggctgaccgcccaacgacccccgcccattgacgtcaataatgacgtatgttcccatagtaacgccaatagggactttccattgacgtcaatgggtggagtatttacggtaaactgcccacttggcagtacatcaagtgtatcatatgccaagtacgccccctattgacgtcaatgacggtaaatggcccgcctggcattatgcccagtacatgaccttatgggactttcctacttggcagtacatctacgtattagtcatcgctattaccatggtgatgcggttttggcagtacatcaatgggcgtggatagcggtttgactcacggggatttccaagtctccaccccattgacgtcaatgggagtttgttttggcaccaaaatcaacgggactttccaaaatgtcgtaacaactccgccccattgacgcaaatgggcggtaggcgtgtacggtgggaggtctatataagcagcgcgttttgcct

SEQ ID NO: 65 - DNA, 10080 bp, synthetic construct
  misc_feature 1..10080: note = Synthetic: RMP005-SEAP (EF1a-SEAP-RMP5)
  source 1..10080: mol_type = other DNA
gtactgggtctctctggttagaccagatctgagcctgggagctctctggctaactagggaacccactgcttaagcctcaataaagcttgccttgagtgcttcaagtagtgtgtgcccgtctgttgtgtgactctggtaactagagatccctcagacccttttagtcagtgtggaaaatctctagcagtggcgcccgaacagggacttgaaagcgaaagggaaaccagaggagctctctcgacgcaggactcggcttgctgaagcgcgcacggcaagaggcgaggggcggcgactggtgagtacgccaaaaattttgactagcggaggctagaaggagagagatgggtgcgagagcgtcagtattaagcgggggagaattagatcgcgatgggaaaaaattcggttaaggccagggggaaagaaaaaatataaattaaaacatatagtatgggcaagcagggagctagaacgattcgcagttaatcctggcctgttagaaacatcagaaggctgtagacaaatactgggacagctacaaccatcccttcagacaggatcagaagaacttagatcattatataatacagtagcaaccctctattgtgtgcatcaaaggatagagataaaagacaccaaggaagctttagacaagatagaggaagagcaaaacaaaagtaagaccaccgcacagcaagcggccgctgatcttcagacctggaggaggagatatgagggacaattggagaagtgaattatataaatataaagtagtaaaaattgaaccattaggagtagcacccaccaaggcaaagagaagagtggtgcagagagaaaaaagagcagtgggaataggagctttgttccttgggttcttgggagcagcaggaagcactatgggcgcagcgtcaatgacgctgacggtacaggccagacaattattgtctggtatagtgcagcagcagaacaatttgctgagggctattgaggcgcaacagcatctgttgcaactcacagtctggggcatcaagcagctccaggcaagaatcctggctgtggaaagatacctaaaggatcaacagctcctggggatttggggttgctctggaaaactcatttgcaccactgctgtgccttggaatgctagttggagtaataaatctctggaacagatttggaatcacacgacctggatggagtgggacagagaaattaacaattacacaagcttaatacactccttaattgaagaatcgcaaaaccagcaagaaaagaatgaacaagaattattggaattagataaatgggcaagtttgtggaattggtttaacataacaaattggctgtggtatataaaattattcataatgatagtaggaggcttggtaggtttaagaatagtttttgctgtactttctatagtgaatagagttaggcagggatattcaccattatcgtttcagacccacctcccaaccccgaggggacccgacaggcccgaaggaatagaagaagaaggtggagagagagacagagacagatccattcgattagtgaacggatcggcactgcgtgcgccaattctgcagacaaatggcagtattcatccacaattttaaaagaaaaggggggattggggggtacagtgcaggggaaagaatagtagacataatagcaacagacatacaaactaaagaattacaaaaacaaattacaaaaattcaaaattttcgggtttattacagggacagcagagatccagtttggttaattaaggatctgcgatcgctccggtgcccgtcagtgggcagagcgcacatcgcccacagtccccgagaagttggggggaggggtcggcaattgaaccggtgcctagagaaggtggcgcggggtaaactgggaaagtgatgtcgtgtactggctccgcctttttcccgagggtgggggagaaccgtatataagtgcagtagtcgccgtgaacgttctttttcgcaacgggtttgccgccagaacacagctgaagcttcgaggggctcgcatctctccttcacgcgcccgccgccctacctgaggccgccatccacgccggttgagtcgcgttctgccgcctcccgcctgtggtgcctcctgaactgcgtccgccgtctaggtaagtttaaagctcaggtcgagaccgggcctttgtccggcgctcccttggagcctacctagactcagccggctctccacgctttgcctgaccctgcttgctcaactctacgtctttgtttcgttttctgttctgcgccgttacagatccaagctgtgaccggcgcctaggatccccgggtaccggtcgtacgttcgaagctagcatgctccttctgctgttgctccttggtttgcgccttcagctgagtcttggacttgtccctgaaaaggagaaggaccccaaatattggagagaccaggctcaggaaaccctcaagtacgctcttgaactgcaaaagcttaatactaacgtggctaaaaacgtgataatgttcttgggggacggaatgggggtttcaaccgttaccgcggccagaatcttgaaagggcagctgcaccataacccaggcgaagaaacgaggctggagatggacaaatttccattcgtggcgctttctaagacctacaacactaacgcccaggtccctgactcagctggtacggccactgcctacctttgtggagtgaaggcaaatgaggggactgttggtgtttccgcagctactgagagatctcggtgtaatacgactcaaggtaatgaagttacatccatactccgatgggcaaaagacgcgggcaaatctgttgggattgttacaactactagggtgaaccatgcgacaccctctgcagcttatgcgcacagtgccgaccgagactggtattcagataatgagatgccacccgaggcccttagccagggctgcaaggacatagcctatcaattgatgcacaatatcagagacatagacgttataatgggtggtggtcgcaagtacatgtaccccaaaaacaaaaccgacgtagagtatgaatccgatgaaaaagctaggggcaccagactcgacggacttgatctggttgatacatggaaatcctttaaacctcggtataagcattcacatttcatctggaacaggaccgaacttctcacattggacccccacaatgttgactatctcctcggtttgtttgaaccaggggatatgcagtatgagctcaatcggaacaacgtcactgaccccagtttgagtgaaatggtcgttgttgcaatacaaattttgaggaaaaatccaaaggggtttttcttgttggtagagggcggacggatagatcacgggcaccacgaaggcaaagcaaaacaggccctgcacgaagccgttgaaatggatcgcgctatcggtcaagccggctccctgacgagtagtgaagataccttgaccgtcgtcactgcggatcatagccacgtttttacctttgggggatacacccccaggggcaactcaatttttggacttgcaccgatgctcagcgacacagataaaaagccttttactgcgattctgtatggcaacggccctggatacaaagtagtagggggtgaaagggaaaacgtcagcatggtggactatgcacacaataattatcaggcgcagtccgctgttccgctgcggcatgagactcacgggggagaggacgttgctgtcttttccaagggaccaatggctcatcttctccatggagtccatgagcaaaattatgtccctcatgtcatggcatacgctgcatgtataggagcaaatctcgggcactgtgcaccggcgtcctccgattccagcgacagttcagacagctctgacagctccgattcctccgactcaagttgagaattcgatatcaagcttatcgataatcaacctctggattacaaaatttgtgaaagattgactggtattcttaactatgttgctccttttacgctatgtggatacgctgctttaatgcctttgtatcatgctattgcttcccgtatggctttcattttctcctccttgtataaatcctggttgctgtctctttatgaggagttgtggcccgttgtcaggcaacgtggcgtggtgtgcactgtgtttgctgacgcaacccccactggttggggcattgccaccacctgtcagctcctttccgggactttcgctttccccctccctattgccacggcggaactcatcgccgcctgccttgcccgctgctggacaggggctcggctgttgggcactgacaattccgtggtgttgtcggggaaatcatcgtcctttccttggctgctcgcctgtgttgccacctggattctgcgcgggacgtccttctgctacgtcccttcggccctcaatccagcggaccttccttcccgcggcctgctgccggctctgcggcctcttccgcgtcttcgccttcgccctcagacgagtcggatctccctttgggccgcctccccgcatcgataccgtcgacctcgatcgagacctagaaaaacatggagcaatcacaagtagcaatacagcagctaccaatgctgattgtgcctggctagaagcacaagaggaggaggaggtgggttttccagtcacacctcaggtacctttaagaccaatgacttacaaggcagctgtagatcttagccactttttaaaagaaaaggggggactggaagggctaattcactcccaacgaagacaagatatccttgatctgtggatctaccacacacaaggctacttccctgattggcagaactacacaccagggccagggatcagatatccactgacctttggatggtgctacaagctagtaccagttgagcaagagaaggtagaagaagccaatgaaggagagaacacccgcttgttacaccctgtgagcctgcatgggatggatgacccggagagagaagtattagagtggaggtttgacagccgcctagcatttcatcacatggcccgagagctgcatccggactgtactgggtctctctggttagaccagatctgagcctgggagctctctggctaactagggaacccactgcttaagcctcaataaagcttgccttgagtgcttcaagtagtgtgtgcccgtctgttgtgtgactctggtaactagagatccctcagacccttttagtcagtgtggaaaatctctagcagggcccgtttaaacccgctgatcagcctcgactgtgccttctagttgccagccatctgttgtttgcccctcccccgtgccttccttgaccctggaaggtgccactcccactgtcctttcctaataaaatgaggaaattgcatcgcattgtctgagtaggtgtcattctattctggggggtggggtggggcaggacagcaagggggaggattgggaagacaatagcaggcatgctggggatgcggtgggctctatggcttctgaggcggaaagaaccagctggggctctagggggtatccccacgcgccctgtagcggcgcattaagcgcggcgggtgtggtggttacgcgcagcgtgaccgctacacttgccagcgccctagcgcccgctcctttcgctttcttcccttcctttctcgccacgttcgccggctttccccgtcaagctctaaatcgggggctccctttagggttccgatttagtgctttacggcacctcgaccccaaaaaacttgattagggtgatggttcacgtagtgggccatcgccctgatagacggtttttcgccctttgacgttggagtccacgttctttaatagtggactcttgttccaaactggaacaacactcaaccctatctcggtctattcttttgatttataagggattttgccgatttcggcctattggttaaaaaatgagctgatttaacaaaaatttaacgcgaattaattctgtggaatgtgtgtcagttagggtgtggaaagtccccaggctccccagcaggcagaagtatgcaaagcatgcatctcaattagtcagcaaccaggtgtggaaagtccccaggctccccagcaggcagaagtatgcaaagcatgcatctcaattagtcagcaaccatagtcccgcccctaactccgcccatcccgcccctaactccgcccagttccgcccattctccgccccatggctgactaattttttttatttatgcagaggccgaggccgcctctgcctctgagctattccagaagtagtgaggaggcttttttggaggcctaggcttttgcaaaaagctcccgggagcttgtatatccattttcggatctgatcagcacgtgttgacaattaatcatcggcatagtatatcggcatagtataatacgacaaggtgaggaactaaaccatggccaagttgaccagtgccgttccggtgctcaccgcgcgcgacgtcgccggagcggtcgagttctggaccgaccggctcgggttctcccgggacttcgtggaggacgacttcgccggtgtggtccgggacgacgtgaccctgttcatcagcgcggtccaggaccaggtggtgccggacaacaccctggcctgggtgtgggtgcgcggcctggacgagctgtacgccgagtggtcggaggtcgtgtccacgaacttccgggacgcctccgggccggccatgaccgagatcggcgagcagccgtgggggcgggagttcgccctgcgcgacccggccggcaactgcgtgcacttcgtggccgaggagcaggactgacacgtgctacgagatttcgattccaccgccgccttctatgaaaggttgggcttcggaatcgttttccgggacgccggctggatgatcctccagcgcggggatctcatgctggagttcttcgcccaccccaacttgtttattgcagcttataatggttacaaataaagcaatagcatcacaaatttcacaaataaagcatttttttcactgcattctagttgtggtttgtccaaactcatcaatgtatcttatcatgtctgtataccgtcgacctctagctagagcttggcgtaatcatggtcatagctgtttcctgtgtgaaattgttatccgctcacaattccacacaacatacgagccggaagcataaagtgtaaagcctggggtgcctaatgagtgagctaactcacattaattgcgttgcgctcactgcccgctttccagtcgggaaacctgtcgtgccagctgcattaatgaatcggccaacgcgcggggagaggcggtttgcgtattgggcgctcttccgcttcctcgctcactgactcgctgcgctcggtcgttcggctgcggcgagcggtatcagctcactcaaaggcggtaatacggttatccacagaatcaggggataacgcaggaaagaacatgtgagcaaaaggccagcaaaaggccaggaaccgtaaaaaggccgcgttgctggcgtttttccataggctccgcccccctgacgagcatcacaaaaatcgacgctcaagtcagaggtggcgaaacccgacaggactataaagataccaggcgtttccccctggaagctccctcgtgcgctctcctgttccgaccctgccgcttaccggatacctgtccgcctttctcccttcgggaagcgtggcgctttctcatagctcacgctgtaggtatctcagttcggtgtaggtcgttcgctccaagctgggctgtgtgcacgaaccccccgttcagcccgaccgctgcgccttatccggtaactatcgtcttgagtccaacccggtaagacacgacttatcgccactggcagcagccactggtaacaggattagcagagcgaggtatgtaggcggtgctacagagttcttgaagtggtggcctaactacggctacactagaagaacagtatttggtatctgcgctctgctgaagccagttaccttcggaaaaagagttggtagctcttgatccggcaaacaaaccaccgctggtagcggtggtttttttgtttgcaagcagcagattacgcgcagaaaaaaaggatctcaagaagatcctttgatcttttctacggggtctgacgctcagtggaacgaaaactcacgttaagggattttggtcatgagattatcaaaaaggatcttcacctagatccttttaaattaaaaatgaagttttaaatcaatctaaagtatatatgagtaaacttggtctgacagttaccaatgcttaatcagtgaggcacctatctcagcgatctgtctatttcgttcatccatagttgcctgactccccgtcgtgtagataactacgatacgggagggcttaccatctggccccagtgctgcaatgataccgcgagacccacgctcaccggctccagatttatcagcaataaaccagccagccggaagggccgagcgcagaagtggtcctgcaactttatccgcctccatccagtctattaattgttgccgggaagctagagtaagtagttcgccagttaatagtttgcgcaacgttgttgccattgctacaggcatcgtggtgtcacgctcgtcgtttggtatggcttcattcagctccggttcccaacgatcaaggcgagttacatgatcccccatgttgtgcaaaaaagcggttagctccttcggtcctccgatcgttgtcagaagtaagttggccgcagtgttatcactcatggttatggcagcactgcataattctcttactgtcatgccatccgtaagatgcttttctgtgactggtgagtactcaaccaagtcattctgagaatagtgtatgcggcgaccgagttgctcttgcccggcgtcaatacgggataataccgcgccacatagcagaactttaaaagtgctcatcattggaaaacgttcttcggggcgaaaactctcaaggatcttaccgctgttgagatccagttcgatgtaacccactcgtgcacccaactgatcttcagcatcttttactttcaccagcgtttctgggtgagcaaaaacaggaaggcaaaatgccgcaaaaaagggaataagggcgacacggaaatgttgaatactcatactcttcctttttcaatattattgaagcatttatcagggttattgtctcatgagcggatacatatttgaatgtatttagaaaaataaacaaataggggttccgcgcacatttccccgaaaagtgccacctgacgtcgacggatcgggagatctcccgatcccctatggtgcactctcagtacaatctgctctgatgccgcatagttaagccagtatctgctccctgcttgtgtgttggaggtcgctgagtagtgcgcgagcaaaatttaagctacaacaaggcaaggcttgaccgacaattgcatgaagaatctgcttagggttaggcgttttgcgctgcttcgcgatgtacgggccagatatacgcgttgacattgattattgactagttattaatagtaatcaattacggggtcattagttcatagcccatatatggagttccgcgttacataacttacggtaaatggcccgcctggctgaccgcccaacgacccccgcccattgacgtcaataatgacgtatgttcccatagtaacgccaatagggactttccattgacgtcaatgggtggagtatttacggtaaactgcccacttggcagtacatcaagtgtatcatatgccaagtacgccccctattgacgtcaatgacggtaaatggcccgcctggcattatgcccagtacatgaccttatgggactttcctacttggcagtacatctacgtattagtcatcgctattaccatggtgatgcggttttggcagtacatcaatgggcgtggatagcggtttgactcacggggatttccaagtctccaccccattgacgtcaatgggagtttgttttggcaccaaaatcaacgggactttccaaaatgtcgtaacaactccgccccattgacgcaaatgggcggtaggcgtgtacggtgggaggtctatataagcagcgcgttttgcct

SEQ ID NO: 66 - DNA, 347 bp, synthetic construct
  misc_feature 1..347: note = Synthetic: MND promoter
  source 1..347: mol_type = other DNA
gaacagagagacagcagaatatgggccaaacaggatatctgtggtaagcagttcctgccccggctcagggccaagaacagttggaacagcagaatatgggccaaacaggatatctgtggtaagcagttcctgccccggctcagggccaagaacagatggtccccagatgcggtcccgccctcagcagtttctagagaaccatcagatgtttccagggtgccccaaggacctgaaatgaccctgtgccttatttgaactaaccaatcagttcgcttctcgcttctgttcgcgcgcttctgctccccgagctctatataagcagagctcgtttagtgaaccgtcagatc

SEQ ID NO: 67 - DNA, 543 bp, Homo sapiens
  misc_feature 1..543: note = EF1A promoter
  source 1..543: mol_type = genomic DNA
ggatctgcgatcgctccggtgcccgtcagtgggcagagcgcacatcgcccacagtccccgagaagttggggggaggggtcggcaattgaaccggtgcctagagaaggtggcgcggggtaaactgggaaagtgatgtcgtgtactggctccgcctttttcccgagggtgggggagaaccgtatataagtgcagtagtcgccgtgaacgttctttttcgcaacgggtttgccgccagaacacagctgaagcttcgaggggctcgcatctctccttcacgcgcccgccgccctacctgaggccgccatccacgccggttgagtcgcgttctgccgcctcccgcctgtggtgcctcctgaactgcgtccgccgtctaggtaagtttaaagctcaggtcgagaccgggcctttgtccggcgctcccttggagcctacctagactcagccggctctccacgctttgcctgaccctgcttgctcaactctacgtctttgtttcgttttctgttctgcgccgttacagatccaagctgtgaccggcgccta

SEQ ID NO: 68 - protein, 512 aa, synthetic construct; identical to SEQ ID NO: 3
  REGION 1..512: note = Synthetic: Synthetic Sequence

SEQ ID NO: 69 - DNA, 72 bp, Homo sapiens
  misc_feature 1..72: note = Human IgKVIII Signal Peptide
  source 1..72: mol_type = genomic DNA
atggatatgcgcgtacccgctcaacttctgggtttgttgctgctttggctcaggggagcccgctgtgccgcg

SEQ ID NO: 70 - DNA, 1455 bp, Homo sapiens
  misc_feature 1..1455: note = TNSALP-anchorless
  source 1..1455: mol_type = genomic DNA
cttgtccctgaaaaggagaaggaccccaaatattggagagaccaggctcaggaaaccctcaagtacgctcttgaactgcaaaagcttaatactaacgtggctaaaaacgtgataatgttcttgggggacggaatgggggtttcaaccgttaccgcggccagaatcttgaaagggcagctgcaccataacccaggcgaagaaacgaggctggagatggacaaatttccattcgtggcgctttctaagacctacaacactaacgcccaggtccctgactcagctggtacggccactgcctacctttgtggagtgaaggcaaatgaggggactgttggtgtttccgcagctactgagagatctcggtgtaatacgactcaaggtaatgaagttacatccatactccgatgggcaaaagacgcgggcaaatctgttgggattgttacaactactagggtgaaccatgcgacaccctctgcagcttatgcgcacagtgccgaccgagactggtattcagataatgagatgccacccgaggcccttagccagggctgcaaggacatagcctatcaattgatgcacaatatcagagacatagacgttataatgggtggtggtcgcaagtacatgtaccccaaaaacaaaaccgacgtagagtatgaatccgatgaaaaagctaggggcaccagactcgacggacttgatctggttgatacatggaagagcttcaagcccagatacaagcattcacatttcatctggaacaggaccgaacttctcacattggacccccacaatgttgactatctcctcggtttgtttgaaccaggggatatgcagtatgagctcaatcggaacaacgtcactgaccccagtttgagtgaaatggtcgttgttgcaatacaaattttgaggaaaaatccaaaggggtttttcttgttggtagagggcggacggatagatcacgggcaccacgaaggcaaagcaaaacaggccctgcacgaagccgttgaaatggatcgcgctatcggtcaagccggctccctgacgagtagtgaagataccttgaccgtcgtcactgcggatcatagccacgtttttacctttgggggatacacccccaggggcaactcaatttttggacttgcaccgatgctcagcgacacagataaaaagccttttactgcgattctgtatggcaacggccctggatacaaagtagtagggggtgaaagggaaaacgtcagcatggtggactatgcacacaataattatcaggcgcagtccgctgttccgctgcggcatgagactcacgggggagaggacgttgctgtcttttccaagggaccaatggctcatcttctccatggagtccatgagcaaaattatgtccctcatgtcatggcatacgctgcatgtataggagcaaatctcgggcactgtgcaccggcgtcctcc

SEQ ID NO: 71 - DNA, 618 bp, synthetic construct
  misc_feature 1..618: note = Synthetic: IgG-Fc
  source 1..618: mol_type = other DNA
ccgagcgtttttttgttccctcctaaacctaaggacacgctcatgatcagccgcacgccagaggttacctgtgtagtggtggatgtcagccacgaggatccggaagtaaaattcaactggtatgtagatggggtggaggttcacaatgccaaaaccaagccacgagaggaacagtacaatagtacttaccgggtcgtgtctgtattgaccgtcctgcatcaggattggttgaacgggaaagaatataagtgcaaggtgagcaacaaagcacttccggccccaatagagaaaacaattagtaaagcaaaaggacaaccacgggaaccgcaagtttatacactgccgccctctcgagacgagctgaccaaaaatcaggttagccttacatgtttggtcaaggggttctacccgagtgatattgcagtggaatgggaatccaacggtcaaccagaaaataactacaaaactactccgccggtgttggattcagacggctctttctttctgtatagcaaactcactgttgacaagtcaagatggcagcagggcaatgtatttagctgtagtgttatgcacgaagctcttcataaccactacacacaaaagtcactttctctt

SEQ ID NO: 72 - DNA, 54 bp, synthetic construct
  misc_feature 1..54: note = Synthetic: (DSS)6 peptide
  source 1..54: mol_type = other DNA
gattccagcgacagttcagacagctctgacagctccgattcctccgactcaagt

SEQ ID NO: 73 - DNA, 589 bp, synthetic construct
  misc_feature 1..589: note = Synthetic: WPRE
  source 1..589: mol_type = other DNA
aatcaacctctggattacaaaatttgtgaaagattgactggtattcttaactatgttgctccttttacgctatgtggatacgctgctttaatgcctttgtatcatgctattgcttcccgtatggctttcattttctcctccttgtataaatcctggttgctgtctctttatgaggagttgtggcccgttgtcaggcaacgtggcgtggtgtgcactgtgtttgctgacgcaacccccactggttggggcattgccaccacctgtcagctcctttccgggactttcgctttccccctccctattgccacggcggaactcatcgccgcctgccttgcccgctgctggacaggggctcggctgttgggcactgacaattccgtggtgttgtcggggaaatcatcgtcctttccttggctgctcgcctgtgttgccacctggattctgcgcgggacgtccttctgctacgtcccttcggccctcaatccagcggaccttccttcccgcggcctgctgccggctctgcggcctcttccgcgtcttcgccttcgccctcagacgagtcggatctccctttgggccgcctccccgc

SEQ ID NO: 74 - DNA, 10582 bp, synthetic construct
  misc_feature 1..10582: note = Synthetic: LVV-RMP100
  source 1..10582: mol_type = other DNA
gtactgggtctctctggttagaccagatctgagcctgggagctctctggctaactagggaacccactgcttaagcctcaataaagcttgccttgagtgcttcaagtagtgtgtgcccgtctgttgtgtgactctggtaactagagatccctcagacccttttagtcagtgtggaaaatctctagcagtggcgcccgaacagggacttgaaagcgaaagggaaaccagaggagctctctcgacgcaggactcggcttgctgaagcgcgcacggcaagaggcgaggggcggcgactggtgagtacgccaaaaattttgactagcggaggctagaaggagagagatgggtgcgagagcgtcagtattaagcgggggagaattagatcgcgatgggaaaaaattcggttaaggccagggggaaagaaaaaatataaattaaaacatatagtatgggcaagcagggagctagaacgattcgcagttaatcctggcctgttagaaacatcagaaggctgtagacaaatactgggacagctacaaccatcccttcagacaggatcagaagaacttagatcattatataatacagtagcaaccctctattgtgtgcatcaaaggatagagataaaagacaccaaggaagctttagacaagatagaggaagagcaaaacaaaagtaagaccaccgcacagcaagcggccgctgatcttcagacctggaggaggagatatgagggacaattggagaagtgaattatataaatataaagtagtaaaaattgaaccattaggagtagcacccaccaaggcaaagagaagagtggtgcagagagaaaaaagagcagtgggaataggagctttgttccttgggttcttgggagcagcaggaagcactatgggcgcagcgtcaatgacgctgacggtacaggccagacaattattgtctggtatagtgcagcagcagaacaatttgctgagggctattgaggcgcaacagcatctgttgcaactcacagtctggggcatcaagcagctccaggcaagaatcctggctgtggaaagatacctaaaggatcaacagctcctggggatttggggttgctctggaaaactcatttgcaccactgctgtgccttggaatgctagttggagtaataaatctctggaacagatttggaatcacacgacctggatggagtgggacagagaaattaacaattacacaagcttaatacactccttaattgaagaatcgcaaaaccagcaagaaaagaatgaacaagaattattggaattagataaatgggcaagtttgtggaattggtttaacataacaaattggctgtggtatataaaattattcataatgatagtaggaggcttggtaggtttaagaatagtttttgctgtactttctatagtgaatagagttaggcagggatattcaccattatcgtttcagacccacctcccaaccccgaggggacccgacaggcccgaaggaatagaagaagaaggtggagagagagacagagacagatccattcgattagtgaacggatcggcactgcgtgcgccaattctgcagacaaatggcagtattcatccacaattttaaaagaaaaggggggattggggggtacagtgcaggggaaagaatagtagacataatagcaacagacatacaaactaaagaattacaaaaacaaattacaaaaattcaaaattttcgggtttattacagggacagcagagatccagtttggttaattaagaacagagagacagcagaatatgggccaaacaggatatctgtggtaagcagttcctgccccggctcagggccaagaacagttggaacagcagaatatgggccaaacaggatatctgtggtaagcagttcctgccccggctcagggccaagaacagatggtccccagatgcggtcccgccctcagcagtttctagagaaccatcagatgtttccagggtgccccaaggacctgaaatgaccctgtgccttatttgaactaaccaatcagttcgcttctcgcttctgttcgcgcgcttctgctccccgagctctatataagcagagctcgtttagtgaaccgtcagatccgtacgttcgaagctagcgccaccatggatatgcgcgtacccgctcaacttctgggtttgttgctgctttggctcaggggagcccgctgtgccgcgcttgtccctgaaaaggagaaggaccccaaatattggagagaccaggctcaggaaaccctcaagtacgctcttgaactgcaaaagcttaatactaacgtggctaaaaacgtgataatgttcttgggggacggaatgggggtttcaaccgttaccgcggccagaatcttgaaagggcagctgcaccataacccaggcgaagaaacgaggctggagatggacaaatttccattcgtggcgctttctaagacctacaacactaacgcccaggtccctgactcagctggtacggccactgcctacctttgtggagtgaaggcaaatgaggggactgttggtgtttccgcagctactgagagatctcggtgtaatacgactcaaggtaatgaagttacatccatactccgatgggcaaaagacgcgggcaaatctgttgggattgttacaactactagggtgaaccatgcgacaccctctgcagcttatgcgcacagtgccgaccgagactggtattcagataatgagatgccacccgaggcccttagccagggctgcaaggacatagcctatcaattgatgcacaatatcagagacatagacgttataatgggtggtggtcgcaagtacatgtaccccaaaaacaaaaccgacgtagagtatgaatccgatgaaaaagctaggggcaccagactcgacggacttgatctggttgatacatggaagagcttcaagcccagatacaagcattcacatttcatctggaacaggaccgaacttctcacattggacccccacaatgttgactatctcctcggtttgtttgaaccaggggatatgcagtatgagctcaatcggaacaacgtcactgaccccagtttgagtgaaatggtcgttgttgcaatacaaattttgaggaaaaatccaaaggggtttttcttgttggtagagggcggacggatagatcacgggcaccacgaaggcaaagcaaaacaggccctgcacgaagccgttgaaatggatcgcgctatcggtcaagccggctccctgacgagtagtgaagataccttgaccgtcgtcactgcggatcatagccacgtttttacctttgggggatacacccccaggggcaactcaatttttggacttgcaccgatgctcagcgacacagataaaaagccttttactgcgattctgtatggcaacggccctggatacaaagtagtagggggtgaaagggaaaacgtcagcatggtggactatgcacacaataattatcaggcgcagtccgctgttccgctgcggcatgagactcacgggggagaggacgttgctgtcttttccaagggaccaatggctcatcttctccatggagtccatgagcaaaattatgtccctcatgtcatggcatacgctgcatgtataggagcaaatctcgggcactgtgcaccggcgtcctccctcaaagacaaaacacacacttgtccaccttgcccggcacctgaacttctgggcggcccgagcgtttttttgttccctcctaaacctaaggacacgctcatgatcagccgcacgccagaggttacctgtgtagtggtggatgtcagccacgaggatccggaagtaaaattcaactggtatgtagatggggtggaggttcacaatgccaaaaccaagccacgagaggaacagtacaatagtacttaccgggtcgtgtctgtattgaccgtcctgcatcaggattggttgaacgggaaagaatataagtgcaaggtgagcaacaaagcacttccggccccaatagagaaaacaattagtaaagcaaaaggacaaccacgggaaccgcaagtttatacactgccgccctctcgagacgagctgaccaaaaatcaggttagccttacatgtttggtcaaggggttctacccgagtgatattgcagtggaatgggaatccaacggtcaaccagaaaataactacaaaactactccgccggtgttggattcagacggctctttctttctgtatagcaaactcactgttgacaagtcaagatggcagcagggcaatgtatttagctgtagtgttatgcacgaagctcttcataaccactacacacaaaagtcactttctctttccccaggaaaagacatcgattccagcgacagttcagacagctctgacagctccgattcctccgactcaagttgagaattcgatatcaagcttatcgataatcaacctctggattacaaaatttgtgaaagattgactggtattcttaactatgttgctccttttacgctatgtggatacgctgctttaatgcctttgtatcatgctattgcttcccgtatggctttcattttctcctccttgtataaatcctggttgctgtctctttatgaggagttgtggcccgttgtcaggcaacgtggcgtggtgtgcactgtgtttgctgacgcaacccccactggttggggcattgccaccacctgtcagctcctttccgggactttcgctttccccctccctattgccacggcggaactcatcgccgcctgccttgcccgctgctggacaggggctcggctgttgggcactgacaattccgtggtgttgtcggggaaatcatcgtcctttccttggctgctcgcctgtgttgccacctggattctgcgcgggacgtccttctgctacgtcccttcggccctcaatccagcggaccttccttcccgcggcctgctgccggctctgcggcctcttccgcgtcttcgccttcgccctcagacgagtcggatctccctttgggccgcctccccgcatcgataccgtcgacctcgagacctagaaaaacatggagcaatcacaagtagcaatacagcagctaccaatgctgattgtgcctggctagaagcacaagaggaggaggaggtgggttttccagtcacacctcaggtacctttaagaccaatgacttacaaggcagctgtagatcttagccactttttaaaagaaaaggggggactggaagggctaattcactcccaacgaagacaagatatccttgatctgtggatctaccacacacaaggctacttccctgattggcagaactacacaccagggccagggatcagatatccactgacctttggatggtgctacaagctagtaccagttgagcaagagaaggtagaagaagccaatgaaggagagaacacccgcttgttacaccctgtgagcctgcatgggatggatgacccggagagagaagtattagagtggaggtttgacagccgcctagcatttcatcacatggcccgagagctgcatccggactgtactgggtctctctggttagaccagatctgagcctgggagctctctggctaactagggaacccactgcttaagcctcaataaagcttgccttgagtgcttcaagtagtgtgtgcccgtctgttgtgtgactctggtaactagagatccctcagacccttttagtcagtgtggaaaatctctagcagggcccgtttaaacccgctgatcagcctcgactgtgccttctagttgccagccatctgttgtttgcccctcccccgtgccttccttgaccctggaaggtgccactcccactgtcctttcctaataaaatgaggaaattgcatcgcattgtctgagtaggtgtcattctattctggggggtggggtggggcaggacagcaagggggaggattgggaagacaatagcaggcatgctggggatgcggtgggctctatggcttctgaggcggaaagaaccagctggggctctagggggtatccccacgcgccctgtagcggcgcattaagcgcggcgggtgtggtggttacgcgcagcgtgaccgctacacttgccagcgccctagcgcccgctcctttcgctttcttcccttcctttctcgccacgttcgccggctttccccgtcaagctctaaatcgggggctccctttagggttccgatttagtgctttacggcacctcgaccccaaaaaacttgattagggtgatggttcacgtagtgggccatcgccctgatagacggtttttcgccctttgacgttggagtccacgttctttaatagtggactcttgttccaaactggaacaacactcaaccctatctcggtctattcttttgatttataagggattttgccgatttcggcctattggttaaaaaatgagctgatttaacaaaaatttaacgcgaattaattctgtggaatgtgtgtcagttagggtgtggaaagtccccaggctccccagcaggcagaagtatgcaaagcatgcatctcaattagtcagcaaccaggtgtggaaagtccccaggctccccagcaggcagaagtatgcaaagcatgcatctcaattagtcagcaaccatagtcccgcccctaactccgcccatcccgcccctaactccgcccagttccgcccattctccgccccatggctgactaattttttttatttatgcagaggccgaggccgcctctgcctctgagctattccagaagtagtgaggaggcttttttggaggcctaggcttttgcaaaaagctcccgggagcttgtatatccattttcggatctgatcagcacgtgttgacaattaatcatcggcatagtatatcggcatagtataatacgacaaggtgaggaactaaaccatggccaagttgaccagtgccgttccggtgctcaccgcgcgcgacgtcgccggagcggtcgagttctggaccgaccggctcgggttctcccgggacttcgtggaggacgacttcgccggtgtggtccgggacgacgtgaccctgttcatcagcgcggtccaggaccaggtggtgccggacaacaccctggcctgggtgtgggtgcgcggcctggacgagctgtacgccgagtggtcggaggtcgtgtccacgaacttccgggacgcctccgggccggccatgaccgagatcggcgagcagccgtgggggcgggagttcgccctgcgcgacccggccggcaactgcgtgcacttcgtggccgaggagcaggactgacacgtgctacgagatttcgattccaccgccgccttctatgaaaggttgggcttcggaatcgttttccgggacgccggctggatgatcctccagcgcggggatctcatgctggagttcttcgcccaccccaacttgtttattgcagcttataatggttacaaataaagcaatagcatcacaaatttcacaaataaagcatttttttcactgcattctagttgtggtttgtccaaactcatcaatgtatcttatcatgtctgtataccgtcgacctctagctagagcttggcgtaatcatggtcatagctgtttcctgtgtgaaattgttatccgctcacaattccacacaacatacgagccggaagcataaagtgtaaagcctggggtgcctaatgagtgagctaactcacattaattgcgttgcgctcactgcccgctttccagtcgggaaacctgtcgtgccagctgcattaatgaatcggccaacgcgcggggagaggcggtttgcgtattgggcgctcttccgcttcctcgctcactgactcgctgcgctcggtcgttcggctgcggcgagcggtatcagctcactcaaaggcggtaatacggttatccacagaatcaggggataacgcaggaaagaacatgtgagcaaaaggccagcaaaaggccaggaaccgtaaaaaggccgcgttgctggcgtttttccataggctccgcccccctgacgagcatcacaaaaatcgacgctcaagtcagaggtggcgaaacccgacaggactataaagataccaggcgtttccccctggaagctccctcgtgcgctctcctgttccgaccctgccgcttaccggatacctgtccgcctttctcccttcgggaagcgtggcgctttctcatagctcacgctgtaggtatctcagttcggtgtaggtcgttcgctccaagctgggctgtgtgcacgaaccccccgttcagcccgaccgctgcgccttatccggtaactatcgtcttgagtccaacccggtaagacacgacttatcgccactggcagcagccactggtaacaggattagcagagcgaggtatgtaggcggtgctacagagttcttgaagtggtggcctaactacggctacactagaagaacagtatttggtatctgcgctctgctgaagccagttaccttcggaaaaagagttggtagctcttgatccggcaaacaaaccaccgctggtagcggtggtttttttgtttgcaagcagcagattacgcgcagaaaaaaaggatctcaagaagatcctttgatcttttctacggggtctgacgctcagtggaacgaaaactcacgttaagggattttggtcatgagattatcaaaaaggatcttcacctagatccttttaaattaaaaatgaagttttaaatcaatctaaagtatatatgagtaaacttggtctgacagttaccaatgcttaatcagtgaggcacctatctcagcgatctgtctatttcgttcatccatagttgcctgactccccgtcgtgtagataactacgatacgggagggcttaccatctggccccagtgctgcaatgataccgcgagacccacgctcaccggctccagatttatcagcaataaaccagccagccggaagggccgagcgcagaagtggtcctgcaactttatccgcctccatccagtctattaattgttgccgggaagctagagtaagtagttcgccagttaatagtttgcgcaacgttgttgccattgctacaggcatcgtggtgtcacgctcgtcgtttggtatggcttcattcagctccggttcccaacgatcaaggcgagttacatgatcccccatgttgtgcaaaaaagcggttagctccttcggtcctccgatcgttgtcagaagtaagttggccgcagtgttatcactcatggttatggcagcactgcataattctcttactgtcatgccatccgtaagatgcttttctgtgactggtgagtactcaaccaagtcattctgagaatagtgtatgcggcgaccgagttgctcttgcccggcgtcaatacgggataataccgcgccacatagcagaactttaaaagtgctcatcattggaaaacgttcttcggggcgaaaactctcaaggatcttaccgctgttgagatccagttcgatgtaacccactcgtgcacccaactgatcttcagcatcttttactttcaccagcgtttctgggtgagcaaaaacaggaaggcaaaatgccgcaaaaaagggaataagggcgacacggaaatgttgaatactcatactcttcctttttcaatattattgaagcatttatcagggttattgtctcatgagcggatacatatttgaatgtatttagaaaaataaacaaataggggttccgcgcacatttccccgaaaagtgccacctgacgtcgacggatcgggagatctcccgatcccctatggtgcactctcagtacaatctgctctgatgccgcatagttaagccagtatctgctccctgcttgtgtgttggaggtcgctgagtagtgcgcgagcaaaatttaagctacaacaaggcaaggcttgaccgacaattgcatgaagaatctgcttagggttaggcgttttgcgctgcttcgcgatgtacgggccagatatacgcgttgacattgattattgactagttattaatagtaatcaattacggggtcattagttcatagcccatatatggagttccgcgttacataacttacggtaaatggcccgcctggctgaccgcccaacgacccccgcccattgacgtcaataatgacgtatgttcccatagtaacgccaatagggactttccattgacgtcaatgggtggagtatttacggtaaactgcccacttggcagtacatcaagtgtatcatatgccaagtacgccccctattgacgtcaatgacggtaaatggcccgcctggcattatgcccagtacatgaccttatgggactttcctacttggcagtacatctacgtattagtcatcgctattaccatggtgatgcggttttggcagtacatcaatgggcgtggatagcggtttgactcacggggatttccaagtctccaccccattgacgtcaatgggagtttgttttggcaccaaaatcaacgggactttccaaaatgtcgtaacaactccgccccattgacgcaaatgggcggtaggcgtgtacggtgggaggtctatataagcagcgcgttttgcct

SEQ ID NO: 75 - protein, 758 aa, synthetic construct
  REGION 1..758: note = Synthetic: LVV-RMP100
MDMRVPAQLLGLLLLWLRGARCAALVPEKEKDPKYWRDQAQETLKYALELQKLNTNVAKNVIMFLGDGMGVSTVTAARILKGQLHHNPGEETRLEMDKFPFVALSKTYNTNAQVPDSAGTATAYLCGVKANEGTVGVSAATERSRCNTTQGNEVTSILRWAKDAGKSVGIVTTTRVNHATPSAAYAHSADRDWYSDNEMPPEALSQGCKDIAYQLMHNIRDIDVIMGGGRKYMYPKNKTDVEYESDEKARGTRLDGLDLVDTWKSFKPRYKHSHFIWNRTELLTLDPHNVDYLLGLFEPGDMQYELNRNNVTDPSLSEMVVVAIQILRKNPKGFFLLVEGGRIDHGHHEGKAKQALHEAVEMDRAIGQAGSLTSSEDTLTVVTADHSHVFTFGGYTPRGNSIFGLAPMLSDTDKKPFTAILYGNGPGYKVVGGERENVSMVDYAHNNYQAQSAVPLRHETHGGEDVAVFSKGPMAHLLHGVHEQNYVPHVMAYAACIGANLGHCAPASSLKDKTHTCPPCPAPELLGGPSVFLFPPKPKDTLMISRTPEVTCVVVDVSHEDPEVKFNWYVDGVEVHNAKTKPREEQYNSTYRVVSVLTVLHQDWLNGKEYKCKVSNKALPAPIEKTISKAKGQPREPQVYTLPPSRDELTKNQVSLTCLVKGFYPSDIAVEWESNGQPENNYKTTPPVLDSDGSFFLYSKLTVDKSRWQQGNVFSCSVMHEALHNHYTQKSLSLSPGKDIDSSDSSDSSDSSDSSDSS

SEQ ID NO: 76 - protein, 127 aa, Homo sapiens
  SITE 1..127: note = TNSALP-anchorless
VPEKEKDPKYWRDQAQETLKYALELQKLNTNVAKNVIMFLGDGMGVSTVTAARILKGQLHHNPGEETRLEMDKFPFVALSKTYNTNAQVPDSAGTATAYLCGVKANEGTVGVSAATERSRCNTTQGN

SEQ ID NO: 77 - DNA, 26 bp, Homo sapiens
  misc_feature 1..26: note = miR362-5p
  source 1..26: mol_type = genomic DNA
aaatccttggaacctaggtgtgagtg

SEQ ID NO: 78 - DNA, 25 bp, synthetic construct
  misc_feature 1..25: note = Synthetic: RMP5 (769-792)
  source 1..25: mol_type = other DNA
aaatcctttaaacctcggtataaag

SEQ ID NO: 79 - DNA, 24 bp, synthetic construct
  misc_feature 1..24: note = Synthetic: miR362-A
  source 1..24: mol_type = other DNA
aagagcttcaagcccagatacaag

SEQ ID NO: 80 - DNA, 24 bp, synthetic construct
  misc_feature 1..24: note = Synthetic: miR362-B
  source 1..24: mol_type = other DNA
aaatctttcaagccccggtacaaa

SEQ ID NO: 81 - DNA, 10087 bp, synthetic construct
  misc_feature 1..10087: note = Synthetic: EF1a-RMP5-miR362-A
  source 1..10087: mol_type = other DNA
gtactgggtctctctggttagaccagatctgagcctgggagctctctggctaactagggaacccactgcttaagcctcaataaagcttgccttgagtgcttcaagtagtgtgtgcccgtctgttgtgtgactctggtaactagagatccctcagacccttttagtcagtgtggaaaatctctagcagtggcgcccgaacagggacttgaaagcgaaagggaaaccagaggagctctctcgacgcaggactcggcttgctgaagcgcgcacggcaagaggcgaggggcggcgactggtgagtacgccaaaaattttgactagcggaggctagaaggagagagatgggtgcgagagcgtcagtattaagcgggggagaattagatcgcgatgggaaaaaattcggttaaggccagggggaaagaaaaaatataaattaaaacatatagtatgggcaagcagggagctagaacgattcgcagttaatcctggcctgttagaaacatcagaaggctgtagacaaatactgggacagctacaaccatcccttcagacaggatcagaagaacttagatcattatataatacagtagcaaccctctattgtgtgcatcaaaggatagagataaaagacaccaaggaagctttagacaagatagaggaagagcaaaacaaaagtaagaccaccgcacagcaagcggccgctgatcttcagacctggaggaggagatatgagggacaattggagaagtgaattatataaatataaagtagtaaaaattgaaccattaggagtagcacccaccaaggcaaagagaagagtggtgcagagagaaaaaagagcagtgggaataggagctttgttccttgggttcttgggagcagcaggaagcactatgggcgcagcgtcaatgacgctgacggtacaggccagacaattattgtctggtatagtgcagcagcagaacaatttgctgagggctattgaggcgcaacagcatctgttgcaactcacagtctggggcatcaagcagctccaggcaagaatcctggctgtggaaagatacctaaaggatcaacagctcctggggatttggggttgctctggaaaactcatttgcaccactgctgtgccttggaatgctagttggagtaataaatctctggaacagatttggaatcacacgacctggatggagtgggacagagaaattaacaattacacaagcttaatacactccttaattgaagaatcgcaaaaccagcaagaaaagaatgaacaagaattattggaattagataaatgggcaagtttgtggaattggtttaacataacaaattggctgtggtatataaaattattcataatgatagtaggaggcttggtaggtttaagaatagtttttgctgtactttctatagtgaatagagttaggcagggatattcaccattatcgtttcagacccacctcccaaccccgaggggacccgacaggcccgaaggaatagaagaagaaggtggagagagagacagagacagatccattcgattagtgaacggatcggcactgcgtgcgccaattctgcagacaaatggcagtattcatccacaattttaaaagaaaaggggggattggggggtacagtgcaggggaaagaatagtagacataatagcaacagacatacaaactaaagaattacaaaaacaaattacaaaaattcaaaattttcgggtttattacagggacagcagagatccagtttggttaattaaggatctgcgatcgctccggtgcccgtcagtgggcagagcgcacatcgcccacagtccccgagaagttggggggaggggtcggcaattgaaccggtgcctagagaaggtggcgcggggtaaactgggaaagtgatgtcgtgtactggctccgcctttttcccgagggtgggggagaaccgtatataagtgcagtagtcgccgtgaacgttctttttcgcaacgggtttgccgccagaacacagctgaagcttcgaggggctcgcatctctccttcacgcgcccgccgccctacctgaggccgccatccacgccggttgagtcgcgttctgccgcctcccgcctgtggtgcctcctgaactgcgtccgccgtctaggtaagtttaaagctcaggtcgagaccgggcctttgtccggcgctcccttggagcctacctagactcagccggctctccacgctttgcctgaccctgcttgctcaactctacgtctttgtttcgttttctgttctgcgccgttacagatccaagctgtgaccggcgcctacggatccccgggtaccggtcgtacgttcgaagctagcatgggatggtcctgcataatcctttttttggtcgcaacagccacaggtgtgcacagtcttgtccctgaaaaggagaaggaccccaaatattggagagaccaggctcaggaaaccctcaagtacgctcttgaactgcaaaagcttaatactaacgtggctaaaaacgtgataatgttcttgggggacggaatgggggtttcaaccgttaccgcggccagaatcttgaaagggcagctgcaccataacccaggcgaagaaacgaggctggagatggacaaatttccattcgtggcgctttctaagacctacaacactaacgcccaggtccctgactcagctggtacggccactgcctacctttgtggagtgaaggcaaatgaggggactgttggtgtttccgcagctactgagagatctcggtgtaatacgactcaaggtaatgaagttacatccatactccgatgggcaaaagacgcgggcaaatctgttgggattgttacaactactagggtgaaccatgcgacaccctctgcagcttatgcgcacagtgccgaccgagactggtattcagataatgagatgccacccgaggcccttagccagggctgcaaggacatagcctatcaattgatgcacaatatcagagacatagacgttataatgggtggtggtcgcaagtacatgtaccccaaaaacaaaaccgacgtagagtatgaatccgatgaaaaagctaggggcaccagactcgacggacttgatctggttgatacatggaagagcttcaagcccagatacaagcattcacatttcatctggaacaggaccgaacttctcacattggacccccacaatgttgactatctcctcggtttgtttgaaccaggggatatgcagtatgagctcaatcggaacaacgtcactgaccccagtttgagtgaaatggtcgttgttgcaatacaaattttgaggaaaaatccaaaggggtttttcttgttggtagagggcggacggatagatcacgggcaccacgaaggcaaagcaaaacaggccctgcacgaagccgttgaaatggatcgcgctatcggtcaagccggctccctgacgagtagtgaagataccttgaccgtcgtcactgcggatcatagccacgtttttacctttgggggatacacccccaggggcaactcaatttttggacttgcaccgatgctcagcgacacagataaaaagccttttactgcgattctgtatggcaacggccctggatacaaagtagtagggggtgaaagggaaaacgtcagcatggtggactatgcacacaataattatcaggcgcagtccgctgttccgctgcggcatgagactcacgggggagaggacgttgctgtcttttccaagggaccaatggctcatcttctccatggagtccatgagcaaaattatgtccctcatgtcatggcatacgctgcatgtataggagcaaatctcgggcactgtgcaccggcgtcctccgattccagcgacagttcagacagctctgacagctccgattcctccgactcaagttgagaattcgatatcaagcttatcgataatcaacctctggattacaaaatttgtgaaagattgactggtattcttaactatgttgctccttttacgctatgtggatacgctgctttaatgcctttgtatcatgctattgcttcccgtatggctttcattttctcctccttgtataaatcctggttgctgtctctttatgaggagttgtggcccgttgtcaggcaacgtggcgtggtgtgcactgtgtttgctgacgcaacccccactggttggggcattgccaccacctgtcagctcctttccgggactttcgctttccccctccctattgccacggcggaactcatcgccgcctgccttgcccgctgctggacaggggctcggctgttgggcactgacaattccgtggtgttgtcggggaaatcatcgtcctttccttggctgctcgcctgtgttgccacctggattctgcgcgggacgtccttctgctacgtcccttcggccctcaatccagcggaccttccttcccgcggcctgctgccggctctgcggcctcttccgcgtcttcgccttcgccctcagacgagtcggatctccctttgggccgcctccccgcatcgataccgtcgacctcgatcgagacctagaaaaacatggagcaatcacaagtagcaatacagcagctaccaatgctgattgtgcctggctagaagcacaagaggaggaggaggtgggttttccagtcacacctcaggtacctttaagaccaatgacttacaaggcagctgtagatcttagccactttttaaaagaaaaggggggactggaagggctaattcactcccaacgaagacaagatatccttgatctgtggatctaccacacacaaggctacttccctgattggcagaactacacaccagggccagggatcagatatccactgacctttggatggtgctacaagctagtaccagttgagcaagagaaggtagaagaagccaatgaaggagagaacacccgcttgttacaccctgtgagcctgcatgggatggatgacccggagagagaagtattagagtggaggtttgacagccgcctagcatttcatcacatggcccgagagctgcatccggactgtactgggtctctctggttagaccagatctgagcctgggagctctctggctaactagggaacccactgcttaagcctcaataaagcttgccttgagtgcttcaagtagtgtgtgcccgtctgttgtgtgactctggtaactagagatccctcagacccttttagtcagtgtggaaaatctctagcagggcccgtttaaacccgctgatcagcctcgactgtgccttctagttgccagccatctgttgtttgcccctcccccgtgccttccttgaccctggaaggtgccactcccactgtcctttcctaataaaatgaggaaattgcatcgcattgtctgagtaggtgtcattctattctggggggtggggtggggcaggacagcaagggggaggattgggaagacaatagcaggcatgctggggatgcggtgggctctatggcttctgaggcggaaagaaccagctggggctctagggggtatccccacgcgccctgtagcggcgcattaagcgcggcgggtgtggtggttacgcgcagcgtgaccgctacacttgccagcgccctagcgcccgctcctttcgctttcttcccttcctttctcgccacgttcgccggctttccccgtcaagctctaaatcgggggctccctttagggttccgatttagtgctttacggcacctcgaccccaaaaaacttgattagggtgatggttcacgtagtgggccatcgccctgatagacggtttttcgccctttgacgttggagtccacgttctttaatagtggactcttgttccaaactggaacaacactcaaccctatctcggtctattcttttgatttataagggattttgccgatttcggcctattggttaaaaaatgagctgatttaacaaaaatttaacgcgaattaattctgtggaatgtgtgtcagttagggtgtggaaagtccccaggctccccagcaggcagaagtatgcaaagcatgcatctcaattagtcagcaaccaggtgtggaaagtccccaggctccccagcaggcagaagtatgcaaagcatgcatctcaattagtcagcaaccatagtcccgcccctaactccgcccatcccgcccctaactccgcccagttccgcccattctccgccccatggctgactaattttttttatttatgcagaggccgaggccgcctctgcctctgagctattccagaagtagtgaggaggcttttttggaggcctaggcttttgcaaaaagctcccgggagcttgtatatccattttcggatctgatcagcacgtgttgacaattaatcatcggcatagtatatcggcatagtataatacgacaaggtgaggaactaaaccatggccaagttgaccagtgccgttccggtgctcaccgcgcgcgacgtcgccggagcggtcgagttctggaccgaccggctcgggttctcccgggacttcgtggaggacgacttcgccggtgtggtccgggacgacgtgaccctgttcatcagcgcggtccaggaccaggtggtgccggacaacaccctggcctgggtgtgggtgcgcggcctggacgagctgtacgccgagtggtcggaggtcgtgtccacgaacttccgggacgcctccgggccggccatgaccgagatcggcgagcagccgtgggggcgggagttcgccctgcgcgacccggccggcaactgcgtgcacttcgtggccgaggagcaggactgacacgtgctacgagatttcgattccaccgccgccttctatgaaaggttgggcttcggaatcgttttccgggacgccggctggatgatcctccagcgcggggatctcatgctggagttcttcgcccaccccaacttgtttattgcagcttataatggttacaaataaagcaatagcatcacaaatttcacaaataaagcatttttttcactgcattctagttgtggtttgtccaaactcatcaatgtatcttatcatgtctgtataccgtcgacctctagctagagcttggcgtaatcatggtcatagctgtttcctgtgtgaaattgttatccgctcacaattccacacaacatacgagccggaagcataaagtgtaaagcctggggtgcctaatgagtgagctaactcacattaattgcgttgcgctcactgcccgctttccagtcgggaaacctgtcgtgccagctgcattaatgaatcggccaacgcgcggggagaggcggtttgcgtattgggcgctcttccgcttcctcgctcactgactcgctgcgctcggtcgttcggctgcggcgagcggtatcagctcactcaaaggcggtaatacggttatccacagaatcaggggataacgcaggaaagaacatgtgagcaaaaggccagcaaaaggccaggaaccgtaaaaaggccgcgttgctggcgtttttccataggctccgcccccctgacgagcatcacaaaaatcgacgctcaagtcagaggtggcgaaacccgacaggactataaagataccaggcgtttccccctggaagctccctcgtgcgctctcctgttccgaccctgccgcttaccggatacctgtccgcctttctcccttcgggaagcgtggcgctttctcatagctcacgctgtaggtatctcagttcggtgtaggtcgttcgctccaagctgggctgtgtgcacgaaccccccgttcagcccgaccgctgcgccttatccggtaactatcgtcttgagtccaacccggtaagacacgacttatcgccactggcagcagccactggtaacaggattagcagagcgaggtatgtaggcggtgctacagagttcttgaagtggtggcctaactacggctacactagaagaacagtatttggtatctgcgctctgctgaagccagttaccttcggaaaaagagttggtagctcttgatccggcaaacaaaccaccgctggtagcggtggtttttttgtttgcaagcagcagattacgcgcagaaaaaaaggatctcaagaagatcctttgatcttttctacggggtctgacgctcagtggaacgaaaactcacgttaagggattttggtcatgagattatcaaaaaggatcttcacctagatccttttaaattaaaaatgaagttttaaatcaatctaaagtatatatgagtaaacttggtctgacagttaccaatgcttaatcagtgaggcacctatctcagcgatctgtctatttcgttcatccatagttgcctgactccccgtcgtgtagataactacgatacgggagggcttaccatctggccccagtgctgcaatgataccgcgagacccacgctcaccggctccagatttatcagcaataaaccagccagccggaagggccgagcgcagaagtggtcctgcaactttatccgcctccatccagtctattaattgttgccgggaagctagagtaagtagttcgccagttaatagtttgcgcaacgttgttgccattgctacaggcatcgtggtgtcacgctcgtcgtttggtatggcttcattcagctccggttcccaacgatcaaggcgagttacatgatcccccatgttgtgcaaaaaagcggttagctccttcggtcctccgatcgttgtcagaagtaagttggccgcagtgttatcactcatggttatggcagcactgcataattctcttactgtcatgccatccgtaagatgcttttctgtgactggtgagtactcaaccaagtcattctgagaatagtgtatgcggcgaccgagttgctcttgcccggcgtcaatacgggataataccgcgccacatagcagaactttaaaagtgctcatcattggaaaacgttcttcggggcgaaaactctcaaggatcttaccgctgttgagatccagttcgatgtaacccactcgtgcacccaactgatcttcagcatcttttactttcaccagcgtttctgggtgagcaaaaacaggaaggcaaaatgccgcaaaaaagggaataagggcgacacggaaatgttgaatactcatactcttcctttttcaatattattgaagcatttatcagggttattgtctcatgagcggatacatatttgaatgtatttagaaaaataaacaaataggggttccgcgcacatttccccgaaaagtgccacctgacgtcgacggatcgggagatctcccgatcccctatggtgcactctcagtacaatctgctctgatgccgcatagttaagccagtatctgctccctgcttgtgtgttggaggtcgctgagtagtgcgcgagcaaaatttaagctacaacaaggcaaggcttgaccgacaattgcatgaagaatctgcttagggttaggcgttttgcgctgcttcgcgatgtacgggccagatatacgcgttgacattgattattgactagttattaatagtaatcaattacggggtcattagttcatagcccatatatggagttccgcgttacataacttacggtaaatggcccgcctggctgaccgcccaacgacccccgcccattgacgtcaataatgacgtatgttcccatagtaacgccaatagggactttccattgacgtcaatgggtggagtatttacggtaaactgcccacttggcagtacatcaagtgtatcatatgccaagtacgccccctattgacgtcaatgacggtaaatggcccgcctggcattatgcccagtacatgaccttatgggactttcctacttggcagtacatctacgtattagtcatcgctattaccatggtgatgcggttttggcagtacatcaatgggcgtggatagcggtttgactcacggggatttccaagtctccaccccattgacgtcaatgggagtttgttttggcaccaaaatcaacgggactttccaaaatgtcgtaacaactccgccccattgacgcaaatgggcggtaggcgtgtacggtgggaggtctatataagcagcgcgttttgcct

SEQ ID NO: 82 - DNA, 10087 bp, synthetic construct
  misc_feature 1..10087: note = Synthetic: EF1a-RMP5-miR362-B
  source 1..10087: mol_type = other DNA
gtactgggtctctctggttagaccagatctgagcctgggagctctctggctaactagggaacccactgcttaagcctcaataaagcttgccttgagtgcttcaagtagtgtgtgcccgtctgttgtgtgactctggtaactagagatccctcagacccttttagtcagtgtggaaaatctctagcagtggcgcccgaacagggacttgaaagcgaaagggaaaccagaggagctctctcgacgcaggactcggcttgctgaagcgcgcacggcaagaggcgaggggcggcgactggtgagtacgccaaaaattttgactagcggaggctagaaggagagagatgggtgcgagagcgtcagtattaagcgggggagaattagatcgcgatgggaaaaaattcggttaaggccagggggaaagaaaaaatataaattaaaacatatagtatgggcaagcagggagctagaacgattcgcagttaatcctggcctgttagaaacatcagaaggctgtagacaaatactgggacagctacaaccatcccttcagacaggatcagaagaacttagatcattatataatacagtagcaaccctctattgtgtgcatcaaaggatagagataaaagacaccaaggaagctttagacaagatagaggaagagcaaaacaaaagtaagaccaccgcacagcaagcggccgctgatcttcagacctggaggaggagatatgagggacaattggagaagtgaattatataaatataaagtagtaaaaattgaaccattaggagtagcacccaccaaggcaaagagaagagtggtgcagagagaaaaaagagcagtgggaataggagctttgttccttgggttcttgggagcagcaggaagcactatgggcgcagcgtcaatgacgctgacggtacaggccagacaattattgtctggtatagtgcagcagcagaacaatttgctgagggctattgaggcgcaacagcatctgttgcaactcacagtctggggcatcaagcagctccaggcaagaatcctggctgtggaaagatacctaaaggatcaacagctcctggggatttggggttgctctggaaaactcatttgcaccactgctgtgccttggaatgctagttggagtaataaatctctggaacagatttggaatcacacgacctggatggagtgggacagagaaattaacaattacacaagcttaatacactccttaattgaagaatcgcaaaaccagcaagaaaagaatgaacaagaattattggaattagataaatgggcaagtttgtggaattggtttaacataacaaattggctgtggtatataaaattattcataatgatagtaggaggcttggtaggtttaagaatagtttttgctgtactttctatagtgaatagagttaggcagggatattcaccattatcgtttcagacccacctcccaaccccgaggggacccgacaggcccgaaggaatagaagaagaaggtggagagagagacagagacagatccattcgattagtgaacggatcggcactgcgtgcgccaattctgcagacaaatggcagtattcatccacaattttaaaagaaaaggggggattggggggtacagtgcaggggaaagaatagtagacataatagcaacagacatacaaactaaagaattacaaaaacaaattacaaaaattcaaaattttcgggtttattacagggacagcagagatccagtttggttaattaaggatctgcgatcgctccggtgcccgtcagtgggcagagcgcacatcgcccacagtccccgagaagttggggggaggggtcggcaattgaaccggtgcctagagaaggtggcgcggggtaaactgggaaagtgatgtcgtgtactggctccgcctttttcccgagggtgggggagaaccgtatataagtgcagtagtcgccgtgaacgttctttttcgcaacgggtttgccgccagaacacagctgaagcttcgaggggctcgcatctctccttcacgcgcccgccgccctacctgaggccgccatccacgccggttgagtcgcgttctgccgcctcccgcctgtggtgcctcctgaactgcgtccgccgtctaggtaagtttaaagctcaggtcgagaccgggcctttgtccggcgctcccttggagcctacctagactcagccggctctccacgctttgcctgaccctgcttgctcaactctacgtctttgtttcgttttctgttctgcgccgttacagatccaagctgtgaccggcgcctacggatccccgggtaccggtcgtacgttcgaagctagcatgggatggtcctgcataatcctttttttggtcgcaacagccacaggtgtgcacagtcttgtccctgaaaaggagaaggaccccaaatattggagagaccaggctcaggaaaccctcaagtacgctcttgaactgcaaaagcttaatactaacgtggctaaaaacgtgataatgttcttgggggacggaatgggggtttcaaccgttaccgcggccagaatcttgaaagggcagctgcaccataacccaggcgaagaaacgaggctggagatggacaaatttccattcgtggcgctttctaagacctacaacactaacgcccaggtccctgactcagctggtacggccactgcctacctttgtggagtgaaggcaaatgaggggactgttggtgtttccgcagctactgagagatctcggtgtaatacgactcaaggtaatgaagttacatccatactccgatgggcaaaagacgcgggcaaatctgttgggattgttacaactactagggtgaaccatgcgacaccctctgcagcttatgcgcacagtgccgaccgagactggtattcagataatgagatgccacccgaggcccttagccagggctgcaaggacatagcctatcaattgatgcacaatatcagagacatagacgttataatgggtggtggtcgcaagtacatgtaccccaaaaacaaaaccgacgtagagtatgaatccgatgaaaaagctaggggcaccagactcgacggacttgatctggttgatacatggaaatctttcaagccccggtacaaacattcacatttcatctggaacaggaccgaacttctcacattggacccccacaatgttgactatctcctcggtttgtttgaaccaggggatatgcagtatgagctcaatcggaacaacgtcactgaccccagtttgagtgaaatggtcgttgttgcaatacaaattttgaggaaaaatccaaaggggtttttcttgttggtagagggcggacggatagatcacgggcaccacgaaggcaaagcaaaacaggccctgcacgaagccgttgaaatggatcgcgctatcggtcaagccggctccctgacgagtagtgaagataccttgaccgtcgtcactgcggatcatagccacgtttttacctttgggggatacacccccaggggcaactcaatttttggacttgcaccgatgctcagcgacacagataaaaagccttttactgcgattctgtatggcaacggccctggatacaaagtagtagggggtgaaagggaaaacgtcagcatggtggactatgcacacaataattatcaggcgcagtccgctgttccgctgcggcatgagactcacgggggagaggacgttgctgtcttttccaagggaccaatggctcatcttctccatggagtccatgagcaaaattatgtccctcatgtcatggcatacgctgcatgtataggagcaaatctcgggcactgtgcaccggcgtcctccgattccagcgacagttcagacagctctgacagctccgattcctccgactcaagttgagaattcgatatcaagcttatcgataatcaacctctggattacaaaatttgtgaaagattgactggtattcttaactatgttgctccttttacgctatgtggatacgctgctttaatgcctttgtatcatgctattgcttcccgtatggctttcattttctcctccttgtataaatcctggttgctgtctctttatgaggagttgtggcccgttgtcaggcaacgtggcgtggtgtgcactgtgtttgctgacgcaacccccactggttggggcattgccaccacctgtcagctcctttccgggactttcgctttccccctccctattgccacggcggaactcatcgccgcctgccttgcccgctgctggacaggggctcggctgttgggcactgacaattccgtggtgttgtcggggaaatcatcgtcctttccttggctgctcgcctgtgttgccacctggattctgcgcgggacgtccttctgctacgtcccttcggccctcaatccagcggaccttccttcccgcggcctgctgccggctctgcggcctcttccgcgtcttcgccttcgccctcagacgagtcggatctccctttgggccgcctccccgcatcgataccgtcgacctcgatcgagacctagaaaaacatggagcaatcacaagtagcaatacagcagctaccaatgctgattgtgcctggctagaagcacaagaggaggaggaggtgggttttccagtcacacctcaggtacctttaagaccaatgacttacaaggcagctgtagatcttagccactttttaaaagaaaaggggggactggaagggctaattcactcccaacgaagacaagatatccttgatctgtggatctaccacacacaaggctacttccctgattggcagaactacacaccagggccagggatcagatatccactgacctttggatggtgctacaagctagtaccagttgagcaagagaaggtagaagaagccaatgaaggagagaacacccgcttgttacaccctgtgagcctgcatgggatggatgacccggagagagaagtattagagtggaggtttgacagccgcctagcatttcatcacatggcccgagagctgcatccggactgtactgggtctctctggttagaccagatctgagcctgggagctctctggctaactagggaacccactgcttaagcctcaataaagcttgccttgagtgcttcaagtagtgtgtgcccgtctgttgtgtgactctggtaactagagatccctcagacccttttagtcagtgtggaaaatctctagcagggcccgtttaaacccgctgatcagcctcgactgtgccttctagttgccagccatctgttgtttgcccctcccccgtgccttccttgaccctggaaggtgccactcccactgtcctttcctaataaaatgaggaaattgcatcgcattgtctgagtaggtgtcattctattctggggggtggggtggggcaggacagcaagggggaggattgggaagacaatagcaggcatgctggggatgcggtgggctctatggcttctgaggcggaaagaaccagctggggctctagggggtatccccacgcgccctgtagcggcgcattaagcgcggcgggtgtggtggttacgcgcagcgtgaccgctacacttgccagcgccctagcgcccgctcctttcgctttcttcccttcctttctcgccacgttcgccggctttccccgtcaagctctaaatcgggggctccctttagggttccgatttagtgctttacggcacctcgaccccaaaaaacttgattagggtgatggttcacgtagtgggccatcgccctgatagacggtttttcgccctttgacgttggagtccacgttctttaatagtggactcttgttccaaactggaacaacactcaaccctatctcggtctattcttttgatttataagggattttgccgatttcggcctattggttaaaaaatgagctgatttaacaaaaatttaacgcgaattaattctgtggaatgtgtgtcagttagggtgtggaaagtccccaggctccccagcaggcagaagtatgcaaagcatgcatctcaattagtcagcaaccaggtgtggaaagtccccaggctccccagcaggcagaagtatgcaaagcatgcatctcaattagtcagcaaccatagtcccgcccctaactccgcccatcccgcccctaactccgcccagttccgcccattctccgccccatggctgactaattttttttatttatgcagaggccgaggccgcctctgcctctgagctattccagaagtagtgaggaggcttttttggaggcctaggcttttgcaaaaagctcccgggagcttgtatatccattttcggatctgatcagcacgtgttgacaattaatcatcggcatagtatatcggcatagtataatacgacaaggtgaggaactaaaccatggccaagttgaccagtgccgttccggtgctcaccgcgcgcgacgtcgccggagcggtcgagttctggaccgaccggctcgggttctcccgggacttcgtggaggacgacttcgccggtgtggtccgggacgacgtgaccctgttcatcagcgcggtccaggaccaggtggtgccggacaacaccctggcctgggtgtgggtgcgcggcctggacgagctgtacgccgagtggtcggaggtcgtgtccacgaacttccgggacgcctccgggccggccatgaccgagatcggcgagcagccgtgggggcgggagttcgccctgcgcgacccggccggcaactgcgtgcacttcgtggccgaggagcaggactgacacgtgctacgagatttcgattccaccgccgccttctatgaaaggttgggcttcggaatcgttttccgggacgccggctggatgatcctccagcgcggggatctcatgctggagttcttcgcccaccccaacttgtttattgcagcttataatggttacaaataaagcaatagcatcacaaatttcacaaataaagcatttttttcactgcattctagttgtggtttgtccaaactcatcaatgtatcttatcatgtctgtataccgtcgacctctagctagagcttggcgtaatcatggtcatagctgtttcctgtgtgaaattgttatccgctcacaattccacacaacatacgagccggaagcataaagtgtaaagcctggggtgcctaatgagtgagctaactcacattaattgcgttgcgctcactgcccgctttccagtcgggaaacctgtcgtgccagctgcattaatgaatcggccaacgcgcggggagaggcggtttgcgtattgggcgctcttccgcttcctcgctcactgactcgctgcgctcggtcgttcggctgcggcgagcggtatcagctcactcaaaggcggtaatacggttatccacagaatcaggggataacgcaggaaagaacatgtgagcaaaaggccagcaaaaggccaggaaccgtaaaaaggccgcgttgctggcgtttttccataggctccgcccccctgacgagcatcacaaaaatcgacgctcaagtcagaggtggcgaaacccgacaggactataaagataccaggcgtttccccctggaagctccctcgtgcgctctcctgttccgaccctgccgcttaccggatacctgtccgcctttctcccttcgggaagcgtggcgctttctcatagctcacgctgtaggtatctcagttcggtgtaggtcgttcgctccaagctgggctgtgtgcacgaaccccccgttcagcccgaccgctgcgccttatccggtaactatcgtcttgagtccaacccggtaagacacgacttatcgccactggcagcagccactggtaacaggattagcagagcgaggtatgtaggcggtgctacagagttcttgaagtggtggcctaactacggctacactagaagaacagtatttggtatctgcgctctgctgaagccagttaccttcggaaaaagagttggtagctcttgatccggcaaacaaaccaccgctggtagcggtggtttttttgtttgcaagcagcagattacgcgcagaaaaaaaggatctcaagaagatcctttgatcttttctacggggtctgacgctcagtggaacgaaaactcacgttaagggattttggtcatgagattatcaaaaaggatcttcacctagatccttttaaattaaaaatgaagttttaaatcaatctaaagtatatatgagtaaacttggtctgacagttaccaatgcttaatcagtgaggcacctatctcagcgatctgtctatttcgttcatccatagttgcctgactccccgtcgtgtagataactacgatacgggagggcttaccatctggccccagtgctgcaatgataccgcgagacccacgctcaccggctccagatttatcagcaataaaccagccagccggaagggccgagcgcagaagtggtcctgcaactttatccgcctccatccagtctattaattgttgccgggaagctagagtaagtagttcgccagttaatagtttgcgcaacgttgttgccattgctacaggcatcgtggtgtcacgctcgtcgtttggtatggcttcattcagctccggttcccaacgatcaaggcgagttacatgatcccccatgttgtgcaaaaaagcggttagctccttcggtcctccgatcgttgtcagaagtaagttggccgcagtgttatcactcatggttatggcagcactgcataattctcttactgtcatgccatccgtaagatgcttttctgtgactggtgagtactcaaccaagtcattctgagaatagtgtatgcggcgaccgagttgctcttgcccggcgtcaatacgggataataccgcgccacatagcagaactttaaaagtgctcatcattggaaaacgttcttcggggcgaaaactctcaaggatcttaccgctgttgagatccagttcgatgtaacccactcgtgcacccaactgatcttcagcatcttttactttcaccagcgtttctgggtgagcaaaaacaggaaggcaaaatgccgcaaaaaagggaataagggcgacacggaaatgttgaatactcatactcttcctttttcaatattattgaagcatttatcagggttattgtctcatgagcggatacatatttgaatgtatttagaaaaataaacaaataggggttccgcgcacatttccccgaaaagtgccacctgacgtcgacggatcgggagatctcccgatcccctatggtgcactctcagtacaatctgctctgatgccgcatagttaagccagtatctgctccctgcttgtgtgttggaggtcgctgagtagtgcgcgagcaaaatttaagctacaacaaggcaaggcttgaccgacaattgcatgaagaatctgcttagggttaggcgttttgcgctgcttcgcgatgtacgggccagatatacgcgttgacattgattattgactagttattaatagtaatcaattacggggtcattagttcatagcccatatatggagttccgcgttacataacttacggtaaatggcccgcctggctgaccgcccaacgacccccgcccattgacgtcaataatgacgtatgttcccatagtaacgccaatagggactttccattgacgtcaatgggtggagtatttacggtaaactgcccacttggcagtacatcaagtgtatcatatgccaagtacgccccctattgacgtcaatgacggtaaatggcccgcctggcattatgcccagtacatgaccttatgggactttcctacttggcagtacatctacgtattagtcatcgctattaccatggtgatgcggttttggcagtacatcaatgggcgtggatagcggtttgactcacggggatttccaagtctccaccccattgacgtcaatgggagtttgttttggcaccaaaatcaacgggactttccaaaatgtcgtaacaactccgccccattgacgcaaatgggcggtaggcgtgtacggtgggaggtctatataagcagcgcgttttgcct

SEQ ID NO: 83 - skipped

SEQ ID NO: 84 - DNA, 10988 bp, synthetic construct
  misc_feature 1..10988: note = Synthetic: FG12-SD400i-MND-IgKVIII-AA-RMP5-miR362-A-Fc-(DSS)6
  source 1..10988: mol_type = other DNA
gtactgggtctctctggttagaccagatctgagcctgggagctctctggctaactagggaacccactgcttaagcctcaataaagcttgccttgagtgcttcaagtagtgtgtgcccgtctgttgtgtgactctggtaactagagatccctcagacccttttagtcagtgtggaaaatctctagcagtggcgcccgaacagggacttgaaagcgaaagggaaaccagaggagctctctcgacgcaggactcggcttgctgaagcgcgcacggcaagaggcgaggggcggcgactggtgagtacgccaaaaattttgactagcggaggctagaaggagagagatgggtgcgagagcgtcagtattaagcgggggagaattagatcgcgatgggaaaaaattcggttaaggccagggggaaagaaaaaatataaattaaaacatatagtatgggcaagcagggagctagaacgattcgcagttaatcctggcctgttagaaacatcagaaggctgtagacaaatactgggacagctacaaccatcccttcagacaggatcagaagaacttagatcattatataatacagtagcaaccctctattgtgtgcatcaaaggatagagataaaagacaccaaggaagctttagacaagatagaggaagagcaaaacaaaagtaagaccaccgcacagcaagcggccgctgatcttcagacctggaggaggagatatgagggacaattggagaagtgaattatataaatataaagtagtaaaaattgaaccattaggagtagcacccaccaaggcaaagagaagagtggtgcagagagaaaaaagagcagtgggaataggagctttgttccttgggttcttgggagcagcaggaagcactatgggcgcagcgtcaatgacgctgacggtacaggccagacaattattgtctggtatagtgcagcagcagaacaatttgctgagggctattgaggcgcaacagcatctgttgcaactcacagtctggggcatcaagcagctccaggcaagaatcctggctgtggaaagatacctaaaggatcaacagctcctggggatttggggttgctctggaaaactcatttgcaccactgctgtgccttggaatgctagttggagtaataaatctctggaacagatttggaatcacacgacctggatggagtgggacagagaaattaacaattacacaagcttaatacactccttaattgaagaatcgcaaaaccagcaagaaaagaatgaacaagaattattggaattagataaatgggcaagtttgtggaattggtttaacataacaaattggctgtggtatataaaattattcataatgatagtaggaggcttggtaggtttaagaatagtttttgctgtactttctatagtgaatagagttaggcagggatattcaccattatcgtttcagacccacctcccaaccccgaggggacccgacaggcccgaaggaatagaagaagaaggtggagagagagacagagacagatccattcgattagtgaacggatcggcactgcgtgcgccaattctgcagacaaatggcagtattcatccacaattttaaaagaaaaggggggattggggggtacagtgcaggggaaagaatagtagacataatagcaacagacatacaaactaaagaattacaaaaacaaattacaaaaattcaaaattttcgggtttattacagggacagcagagatccagtttggttaattaagaacagagagacagcagaatatgggccaaacaggatatctgtggtaagcagttcctgccccggctcagggccaagaacagttggaacagcagaatatgggccaaacaggatatctgtggtaagcagttcctgccccggctcagggccaagaacagatggtccccagatgcggtcccgccctcagcagtttctagagaaccatcagatgtttccagggtgccccaaggacctgaaatgaccctgtgccttatttgaactaaccaatcagttcgcttctcgcttctgttcgcgcgcttctgctccccgagctctatataagcagagctcgtttagtgaaccgtcagatccgtacgttcgaagctagcatggatatgcgcgtacccgctcaacttctgggtttgttgctgctttggctcaggggagcccgctgtgccgcgcttgtccctgaaaaggagaaggaccccaaatattggagagaccaggctcaggaaaccctcaagtacgctcttgaactgcaaaagcttaatactaacgtggctaaaaacgtgataatgttcttgggggacggaatgggggtttcaaccgttaccgcggccagaatcttgaaagggcagctgcaccataacccaggcgaagaaacgaggctggagatggacaaatttccattcgtggcgctttctaagacctacaacactaacgcccaggtccctgactcagctggtacggccactgcctacctttgtggagtgaaggcaaatgaggggactgttggtgtttccgcagctactgagagatctcggtgtaatacgactcaaggtaatgaagttacatccatactccgatgggcaaaagacgcgggcaaatctgttgggattgttacaactactagggtgaaccatgcgacaccctctgcagcttatgcgcacagtgccgaccgagactggtattcagataatgagatgccacccgaggcccttagccagggctgcaaggacatagcctatcaattgatgcacaatatcagagacatagacgttataatgggtggtggtcgcaagtacatgtaccccaaaaacaaaaccgacgtagagtatgaatccgatgaaaaagctaggggcaccagactcgacggacttgatctggttgatacatggaagagcttcaagcccagatacaagcattcacatttcatctggaacaggaccgaacttctcacattggacccccacaatgttgactatctcctcggtttgtttgaaccaggggatatgcagtatgagctcaatcggaacaacgtcactgaccccagtttgagtgaaatggtcgttgttgcaatacaaattttgaggaaaaatccaaaggggtttttcttgttggtagagggcggacggatagatcacgggcaccacgaaggcaaagcaaaacaggccctgcacgaagccgttgaaatggatcgcgctatcggtcaagccggctccctgacgagtagtgaagataccttgaccgtcgtcactgcggatcatagccacgtttttacctttgggggatacacccccaggggcaactcaatttttggacttgcaccgatgctcagcgacacagataaaaagccttttactgcgattctgtatggcaacggccctggatacaaagtagtagggggtgaaagggaaaacgtcagcatggtggactatgcacacaataattatcaggcgcagtccgctgttccgctgcggcatgagactcacgggggagaggacgttgctgtcttttccaagggaccaatggctcatcttctccatggagtccatgagcaaaattatgtccctcatgtcatggcatacgctgcatgtataggagcaaatctcgggcactgtgcaccggcgtcctccctcaaagacaaaacacacacttgtccaccttgcccggcacctgaacttctgggcggcccgagcgtttttttgttccctcctaaacctaaggacacgctcatgatcagccgcacgccagaggttacctgtgtagtggtggatgtcagccacgaggatccggaagtaaaattcaactggtatgtagatggggtggaggttcacaatgccaaaaccaagccacgagaggaacagtacaatagtacttaccgggtcgtgtctgtattgaccgtcctgcatcaggattggttgaacgggaaagaatataagtgcaaggtgagcaacaaagcacttccggccccaatagagaaaacaattagtaaagcaaaaggacaaccacgggaaccgcaagtttatacactgccgccctctcgagacgagctgaccaaaaatcaggttagccttacatgtttggtcaaggggttctacccgagtgatattgcagtggaatgggaatccaacggtcaaccagaaaataactacaaaactactccgccggtgttggattcagacggctctttctttctgtatagcaaactcactgttgacaagtcaagatggcagcagggcaatgtatttagctgtagtgttatgcacgaagctcttcataaccactacacacaaaagtcactttctctttccccaggaaaagacatcgattccagcgacagttcagacagctctgacagctccgattcctccgactcaagttgagaattcgatatcaagcttatcgataatcaacctctggattacaaaatttgtgaaagattgactggtattcttaactatgttgctccttttacgctatgtggatacgctgctttaatgcctttgtatcatgctattgcttcccgtatggctttcattttctcctccttgtataaatcctggttgctgtctctttatgaggagttgtggcccgttgtcaggcaacgtggcgtggtgtgcactgtgtttgctgacgcaacccccactggttggggcattgccaccacctgtcagctcctttccgggactttcgctttccccctccctattgccacggcggaactcatcgccgcctgccttgcccgctgctggacaggggctcggctgttgggcactgacaattccgtggtgttgtcggggaaatcatcgtcctttccttggctgctcgcctgtgttgccacctggattctgcgcgggacgtccttctgctacgtcccttcggccctcaatccagcggaccttccttcccgcggcctgctgccggctctgcggcctcttccgcgtcttcgccttcgccctcagacgagtcggatctccctttgggccgcctccccgcatcgataccgtcgacctcgagacctagaaaaacatggagcaatcacaagtagcaatacagcagctaccaatgctgattgtgcctggctagaagcacaagaggaggaggaggtgggttttccagtcacacctcaggtacctttaagaccaatgacttacaaggcagctgtagatcttagccactttttaaaagaaaaggggggactggaagggctaattcactcccaacgaagacaagatatccttgatctgtggatctaccacacacaaggctacttccctgattggcagaactacacaccagggccagggatcagatatccactgacctttggatggtgctacaagctagtaccagttgagcaagagaaggtagaagaagccaatgaaggagagaacacccgcttgttacaccctgtgagcctgcatgggatggatgacccggagagagaagtattagagtggaggtttgacagccgcctagcatttcatcacatggcccgagagctgcatccggaatccctgcaggcattcaaggccaggctggatgtggctctgggcagcctgggctgctggttgatgaccctgcacatagcagggggttggatctggatgagcactgtgctcctttgcaacccaggccgttctatgattctgtcattctaaatctctctttcagcctaaagctttttccccgtatccccccaggtgtctgcaggctcaaagagcagcgagaagcgttcagaggaaagcgatcccgtgccaccttccccgtgcccgggctgtccccgcacgctgccggctcggggatgcggggggagcgccggaccggagcggagccccgggcggctcgctgctgccccctagcgggggagggacgtaattacatccctgggggctttgggggggggctgtccccgtgagctccccctgtactgggtctctctggttagaccagatctgagcctgggagctctctggctaactagggaacccactgcttaagcctcaataaagcttgccttgagtgcttcaagtagtgtgtgcccgtctgttgtgtgactctggtaactagagatccctcagacccttttagtcagtgtggaaaatctctagcagggcccgtttaaacccgctgatcagcctcgactgtgccttctagttgccagccatctgttgtttgcccctcccccgtgccttccttgaccctggaaggtgccactcccactgtcctttcctaataaaatgaggaaattgcatcgcattgtctgagtaggtgtcattctattctggggggtggggtggggcaggacagcaagggggaggattgggaagacaatagcaggcatgctggggatgcggtgggctctatggcttctgaggcggaaagaaccagctggggctctagggggtatccccacgcgccctgtagcggcgcattaagcgcggcgggtgtggtggttacgcgcagcgtgaccgctacacttgccagcgccctagcgcccgctcctttcgctttcttcccttcctttctcgccacgttcgccggctttccccgtcaagctctaaatcgggggctccctttagggttccgatttagtgctttacggcacctcgaccccaaaaaacttgattagggtgatggttcacgtagtgggccatcgccctgatagacggtttttcgccctttgacgttggagtccacgttctttaatagtggactcttgttccaaactggaacaacactcaaccctatctcggtctattcttttgatttataagggattttgccgatttcggcctattggttaaaaaatgagctgatttaacaaaaatttaacgcgaattaattctgtggaatgtgtgtcagttagggtgtggaaagtccccaggctccccagcaggcagaagtatgcaaagcatgcatctcaattagtcagcaaccaggtgtggaaagtccccaggctccccagcaggcagaagtatgcaaagcatgcatctcaattagtcagcaaccatagtcccgcccctaactccgcccatcccgcccctaactccgcccagttccgcccattctccgccccatggctgactaattttttttatttatgcagaggccgaggccgcctctgcctctgagctattccagaagtagtgaggaggcttttttggaggcctaggcttttgcaaaaagctcccgggagcttgtatatccattttcggatctgatcagcacgtgttgacaattaatcatcggcatagtatatcggcatagtataatacgacaaggtgaggaactaaaccatggccaagttgaccagtgccgttccggtgctcaccgcgcgcgacgtcgccggagcggtcgagttctggaccgaccggctcgggttctcccgggacttcgtggaggacgacttcgccggtgtggtccgggacgacgtgaccctgttcatcagcgcggtccaggaccaggtggtgccggacaacaccctggcctgggtgtgggtgcgcggcctggacgagctgtacgccgagtggtcggaggtcgtgtccacgaacttccgggacgcctccgggccggccatgaccgagatcggcgagcagccgtgggggcgggagttcgccctgcgcgacccggccggcaactgcgtgcacttcgtggccgaggagcaggactgacacgtgctacgagatttcgattccaccgccgccttctatgaaaggttgggcttcggaatcgttttccgggacgccggctggatgatcctccagcgcggggatctcatgctggagttcttcgcccaccccaacttgtttattgcagcttataatggttacaaataaagcaatagcatcacaaatttcacaaataaagcatttttttcactgcattctagttgtggtttgtccaaactcatcaatgtatcttatcatgtctgtataccgtcgacctctagctagagcttggcgtaatcatggtcatagctgtttcctgtgtgaaattgttatccgctcacaattccacacaacatacgagccggaagcataaagtgtaaagcctggggtgcctaatgagtgagctaactcacattaattgcgttgcgctcactgcccgctttccagtcgggaaacctgtcgtgccagctgcattaatgaatcggccaacgcgcggggagaggcggtttgcgtattgggcgctcttccgcttcctcgctcactgactcgctgcgctcggtcgttcggctgcggcgagcggtatcagctcactcaaaggcggtaatacggttatccacagaatcaggggataacgcaggaaagaacatgtgagcaaaaggccagcaaaaggccaggaaccgtaaaaaggccgcgttgctggcgtttttccataggctccgcccccctgacgagcatcacaaaaatcgacgctcaagtcagaggtggcgaaacccgacaggactataaagataccaggcgtttccccctggaagctccctcgtgcgctctcctgttccgaccctgccgcttaccggatacctgtccgcctttctcccttcgggaagcgtggcgctttctcatagctcacgctgtaggtatctcagttcggtgtaggtcgttcgctccaagctgggctgtgtgcacgaaccccccgttcagcccgaccgctgcgccttatccggtaactatcgtcttgagtccaacccggtaagacacgacttatcgccactggcagcagccactggtaacaggattagcagagcgaggtatgtaggcggtgctacagagttcttgaagtggtggcctaactacggctacactagaagaacagtatttggtatctgcgctctgctgaagccagttaccttcggaaaaagagttggtagctcttgatccggcaaacaaaccaccgctggtagcggtggtttttttgtttgcaagcagcagattacgcgcagaaaaaaaggatctcaagaagatcctttgatcttttctacggggtctgacgctcagtggaacgaaaactcacgttaagggattttggtcatgagattatcaaaaaggatcttcacctagatccttttaaattaaaaatgaagttttaaatcaatctaaagtatatatgagtaaacttggtctgacagttaccaatgcttaatcagtgaggcacctatctcagcgatctgtctatttcgttcatccatagttgcctgactccccgtcgtgtagataactacgatacgggagggcttaccatctggccccagtgctgcaatgataccgcgagacccacgctcaccggctccagatttatcagcaataaaccagccagccggaagggccgagcgcagaagtggtcctgcaactttatccgcctccatccagtctattaattgttgccgggaagctagagtaagtagttcgccagttaatagtttgcgcaacgttgttgccattgctacaggcatcgtggtgtcacgctcgtcgtttggtatggcttcattcagctccggttcccaacgatcaaggcgagttacatgatcccccatgttgtgcaaaaaagcggttagctccttcggtcctccgatcgttgtcagaagtaagttggccgcagtgttatcactcatggttatggcagcactgcataattctcttactgtcatgccatccgtaagatgcttttctgtgactggtgagtactcaaccaagtcattctgagaatagtgtatgcggcgaccgagttgctcttgcccggcgtcaatacgggataataccgcgccacatagcagaactttaaaagtgctcatcattggaaaacgttcttcggggcgaaaactctcaaggatcttaccgctgttgagatccagttcgatgtaacccactcgtgcacccaactgatcttcagcatcttttactttcaccagcgtttctgggtgagcaaaaacaggaaggcaaaatgccgcaaaaaagggaataagggcgacacggaaatgttgaatactcatactcttcctttttcaatattattgaagcatttatcagggttattgtctcatgagcggatacatatttgaatgtatttagaaaaataaacaaataggggttccgcgcacatttccccgaaaagtgccacctgacgtcgacggatcgggagatctcccgatcccctatggtgcactctcagtacaatctgctctgatgccgcatagttaagccagtatctgctccctgcttgtgtgttggaggtcgctgagtagtgcgcgagcaaaatttaagctacaacaaggcaaggcttgaccgacaattgcatgaagaatctgcttagggttaggcgttttgcgctgcttcgcgatgtacgggccagatatacgcgttgacattgattattgactagttattaatagtaatcaattacggggtcattagttcatagcccatatatggagttccgcgttacataacttacggtaaatggcccgcctggctgaccgcccaacgacccccgcccattgacgtcaataatgacgtatgttcccatagtaacgccaatagggactttccattgacgtcaatgggtggagtatttacggtaaactgcccacttggcagtacatcaagtgtatcatatgccaagtacgccccctattgacgtcaatgacggtaaatggcccgcctggcattatgcccagtacatgaccttatgggactttcctacttggcagtacatctacgtattagtcatcgctattaccatggtgatgcggttttggcagtacatcaatgggcgtggatagcggtttgactcacggggatttccaagtctccaccccattgacgtcaatgggagtttgttttggcaccaaaatcaacgggactttccaaaatgtcgtaacaactccgccccattgacgcaaatgggcggtaggcgtgtacggtgggaggtctatataagcagcgcgttttgcct

SEQ ID NO: 85 - DNA, 10994 bp, synthetic construct
  misc_feature 1..10994: note = Synthetic: FG12-SD400i-MND-Kozak- IgKVIII-AA-RMP5-miR362-A-Fc-(DSS)6
  source 1..10994: mol_type = other DNA
gtactgggtctctctggttagaccagatctgagcctgggagctctctggctaactagggaacccactgcttaagcctcaataaagcttgccttgagtgcttcaagtagtgtgtgcccgtctgttgtgtgactctggtaactagagatccctcagacccttttagtcagtgtggaaaatctctagcagtggcgcccgaacagggacttgaaagcgaaagggaaaccagaggagctctctcgacgcaggactcggcttgctgaagcgcgcacggcaagaggcgaggggcggcgactggtgagtacgccaaaaattttgactagcggaggctagaaggagagagatgggtgcgagagcgtcagtattaagcgggggagaattagatcgcgatgggaaaaaattcggttaaggccagggggaaagaaaaaatataaattaaaacatatagtatgggcaagcagggagctagaacgattcgcagttaatcctggcctgttagaaacatcagaaggctgtagacaaatactgggacagctacaaccatcccttcagacaggatcagaagaacttagatcattatataatacagtagcaaccctctattgtgtgcatcaaaggatagagataaaagacaccaaggaagctttagacaagatagaggaagagcaaaacaaaagtaagaccaccgcacagcaagcggccgctgatcttcagacctggaggaggagatatgagggacaattggagaagtgaattatataaatataaagtagtaaaaattgaaccattaggagtagcacccaccaaggcaaagagaagagtggtgcagagagaaaaaagagcagtgggaataggagctttgttccttgggttcttgggagcagcaggaagcactatgggcgcagcgtcaatgacgctgacggtacaggccagacaattattgtctggtatagtgcagcagcagaacaatttgctgagggctattgaggcgcaacagcatctgttgcaactcacagtctggggcatcaagcagctccaggcaagaatcctggctgtggaaagatacctaaaggatcaacagctcctggggatttggggttgctctggaaaactcatttgcaccactgctgtgccttggaatgctagttggagtaataaatctctggaacagatttggaatcacacgacctggatggagtgggacagagaaattaacaattacacaagcttaatacactccttaattgaagaatcgcaaaaccagcaagaaaagaatgaacaagaattattggaattagataaatgggcaagtttgtggaattggtttaacataacaaattggctgtggtatataaaattattcataatgatagtaggaggcttggtaggtttaagaatagtttttgctgtactttctatagtgaatagagttaggcagggatattcaccattatcgtttcagacccacctcccaaccccgaggggacccgacaggcccgaaggaatagaagaagaaggtggagagagagacagagacagatccattcgattagtgaacggatcggcactgcgtgcgccaattctgcagacaaatggcagtattcatccacaattttaaaagaaaaggggggattggggggtacagtgcaggggaaagaatagtagacataatagcaacagacatacaaactaaagaattacaaaaacaaattacaaaaattcaaaattttcgggtttattacagggacagcagagatccagtttggttaattaagaacagagagacagcagaatatgggccaaacaggatatctgtggtaagcagttcctgccccggctcagggccaagaacagttggaacagcagaatatgggccaaacaggatatctgtggtaagcagttcctgccccggctcagggccaagaacagatggtccccagatgcggtcccgccctcagcagtttctagagaaccatcagatgtttccagggtgccccaaggacctgaaatgaccctgtgccttatttgaactaaccaatcagttcgcttctcgcttctgttcgcgcgcttctgctccccgagctctatataagcagagctcgtttagtgaaccgtcagatccgtacgttcgaagctagcgccaccatggatatgcgcgtacccgctcaacttctgggtttgttgctgctttggctcaggggagcccgctgtgccgcgcttgtccctgaaaaggagaaggaccccaaatattggagagaccaggctcaggaaaccctcaagtacgctcttgaactgcaaaagcttaatactaacgtggctaaaaacgtgataatgttcttgggggacggaatgggggtttcaaccgttaccgcggccagaatcttgaaagggcagctgcaccataacccaggcgaagaaacgaggctggagatggacaaatttccattcgtggcgctttctaagacctacaacactaacgcccaggtccctgactcagctggtacggccactgcctacctttgtggagtgaaggcaaatgaggggactgttggtgtttccgcagctactgagagatctcggtgtaatacgactcaaggtaatgaagttacatccatactccgatgggcaaaagacgcgggcaaatctgttgggattgttacaactactagggtgaaccatgcgacaccctctgcagcttatgcgcacagtgccgaccgagactggtattcagataatgagatgccacccgaggcccttagccagggctgcaaggacatagcctatcaattgatgcacaatatcagagacatagacgttataatgggtggtggtcgcaagtacatgtaccccaaaaacaaaaccgacgtagagtatgaatccgatgaaaaagctaggggcaccagactcgacggacttgatctggttgatacatggaagagcttcaagcccagatacaagcattcacatttcatctggaacaggaccgaacttctcacattggacccccacaatgttgactatctcctcggtttgtttgaaccaggggatatgcagtatgagctcaatcggaacaacgtcactgaccccagtttgagtgaaatggtcgttgttgcaatacaaattttgaggaaaaatccaaaggggtttttcttgttggtagagggcggacggatagatcacgggcaccacgaaggcaaagcaaaacaggccctgcacgaagccgttgaaatggatcgcgctatcggtcaagccggctccctgacgagtagtgaagataccttgaccgtcgtcactgcggatcatagccacgtttttacctttgggggatacacccccaggggcaactcaatttttggacttgcaccgatgctcagcgacacagataaaaagccttttactgcgattctgtatggcaacggccctggatacaaagtagtagggggtgaaagggaaaacgtcagcatggtggactatgcacacaataattatcaggcgcagtccgctgttccgctgcggcatgagactcacgggggagaggacgttgctgtcttttccaagggaccaatggctcatcttctccatggagtccatgagcaaaattatgtccctcatgtcatggcatacgctgcatgtataggagcaaatctcgggcactgtgcaccggcgtcctccctcaaagacaaaacacacacttgtccaccttgcccggcacctgaacttctgggcggcccgagcgtttttttgttccctcctaaacctaaggacacgctcatgatcagccgcacgccagaggttacctgtgtagtggtggatgtcagccacgaggatccggaagtaaaattcaactggtatgtagatggggtggaggttcacaatgccaaaaccaagccacgagaggaacagtacaatagtacttaccgggtcgtgtctgtattgaccgtcctgcatcaggattggttgaacgggaaagaatataagtgcaaggtgagcaacaaagcacttccggccccaatagagaaaacaattagtaaagcaaaaggacaaccacgggaaccgcaagtttatacactgccgccctctcgagacgagctgaccaaaaatcaggttagccttacatgtttggtcaaggggttctacccgagtgatattgcagtggaatgggaatccaacggtcaaccagaaaataactacaaaactactccgccggtgttggattcagacggctctttctttctgtatagcaaactcactgttgacaagtcaagatggcagcagggcaatgtatttagctgtagtgttatgcacgaagctcttcataaccactacacacaaaagtcactttctctttccccaggaaaagacatcgattccagcgacagttcagacagctctgacagctccgattcctccgactcaagttgagaattcgatatcaagcttatcgataatcaacctctggattacaaaatttgtgaaagattgactggtattcttaactatgttgctccttttacgctatgtggatacgctgctttaatgcctttgtatcatgctattgcttcccgtatggctttcattttctcctccttgtataaatcctggttgctgtctctttatgaggagttgtggcccgttgtcaggcaacgtggcgtggtgtgcactgtgtttgctgacgcaacccccactggttggggcattgccaccacctgtcagctcctttccgggactttcgctttccccctccctattgccacggcggaactcatcgccgcctgccttgcccgctgctggacaggggctcggctgttgggcactgacaattccgtggtgttgtcggggaaatcatcgtcctttccttggctgctcgcctgtgttgccacctggattctgcgcgggacgtccttctgctacgtcccttcggccctcaatccagcggaccttccttcccgcggcctgctgccggctctgcggcctcttccgcgtcttcgccttcgccctcagacgagtcggatctccctttgggccgcctccccgcatcgataccgtcgacctcgagacctagaaaaacatggagcaatcacaagtagcaatacagcagctaccaatgctgattgtgcctggctagaagcacaagaggaggaggaggtgggttttccagtcacacctcaggtacctttaagaccaatgacttacaaggcagctgtagatcttagccactttttaaaagaaaaggggggactggaagggctaattcactcccaacgaagacaagatatccttgatctgtggatctaccacacacaaggctacttccctgattggcagaactacacaccagggccagggatcagatatccactgacctttggatggtgctacaagctagtaccagttgagcaagagaaggtagaagaagccaatgaaggagagaacacccgcttgttacaccctgtgagcctgcatgggatggatgacccggagagagaagtattagagtggaggtttgacagccgcctagcatttcatcacatggcccgagagctgcatccggaatccctgcaggcattcaaggccaggctggatgtggctctgggcagcctgggctgctggttgatgaccctgcacatagcagggggttggatctggatgagcactgtgctcctttgcaacccaggccgttctatgattctgtcattctaaatctctctttcagcctaaagctttttccccgtatccccccaggtgtctgcaggctcaaagagcagcgagaagcgttcagaggaaagcgatcccgtgccaccttccccgtgcccgggctgtccccgcacgctgccggctcggggatgcggggggagcgccggaccggagcggagccccgggcggctcgctgctgccccctagcgggggagggacgtaattacatccctgggggctttgggggggggctgtccccgtgagctccccctgtactgggtctctctggttagaccagatctgagcctgggagctctctggctaactagggaacccactgcttaagcctcaataaagcttgccttgagtgcttcaagtagtgtgtgcccgtctgttgtgtgactctggtaactagagatccctcagacccttttagtcagtgtggaaaatctctagcagggcccgtttaaacccgctgatcagcctcgactgtgccttctagttgccagccatctgttgtttgcccctcccccgtgccttccttgaccctggaaggtgccactcccactgtcctttcctaataaaatgaggaaattgcatcgcattgtctgagtaggtgtcattctattctggggggtggggtggggcaggacagcaagggggaggattgggaagacaatagcaggcatgctggggatgcggtgggctctatggcttctgaggcggaaagaaccagctggggctctagggggtatccccacgcgccctgtagcggcgcattaagcgcggcgggtgtggtggttacgcgcagcgtgaccgctacacttgccagcgccctagcgcccgctcctttcgctttcttcccttcctttctcgccacgttcgccggctttccccgtcaagctctaaatcgggggctccctttagggttccgatttagtgctttacggcacctcgaccccaaaaaacttgattagggtgatggttcacgtagtgggccatcgccctgatagacggtttttcgccctttgacgttggagtccacgttctttaatagtggactcttgttccaaactggaacaacactcaaccctatctcggtctattcttttgatttataagggattttgccgatttcggcctattggttaaaaaatgagctgatttaacaaaaatttaacgcgaattaattctgtggaatgtgtgtcagttagggtgtggaaagtccccaggctccccagcaggcagaagtatgcaaagcatgcatctcaattagtcagcaaccaggtgtggaaagtccccaggctccccagcaggcagaagtatgcaaagcatgcatctcaattagtcagcaaccatagtcccgcccctaactccgcccatcccgcccctaactccgcccagttccgcccattctccgccccatggctgactaattttttttatttatgcagaggccgaggccgcctctgcctctgagctattccagaagtagtgaggaggcttttttggaggcctaggcttttgcaaaaagctcccgggagcttgtatatccattttcggatctgatcagcacgtgttgacaattaatcatcggcatagtatatcggcatagtataatacgacaaggtgaggaactaaaccatggccaagttgaccagtgccgttccggtgctcaccgcgcgcgacgtcgccggagcggtcgagttctggaccgaccggctcgggttctcccgggacttcgtggaggacgacttcgccggtgtggtccgggacgacgtgaccctgttcatcagcgcggtccaggaccaggtggtgccggacaacaccctggcctgggtgtgggtgcgcggcctggacgagctgtacgccgagtggtcggaggtcgtgtccacgaacttccgggacgcctccgggccggccatgaccgagatcggcgagcagccgtgggggcgggagttcgccctgcgcgacccggccggcaactgcgtgcacttcgtggccgaggagcaggactgacacgtgctacgagatttcgattccaccgccgccttctatgaaaggttgggcttcggaatcgttttccgggacgccggctggatgatcctccagcgcggggatctcatgctggagttcttcgcccaccccaacttgtttattgcagcttataatggttacaaataaagcaatagcatcacaaatttcacaaataaagcatttttttcactgcattctagttgtggtttgtccaaactcatcaatgtatcttatcatgtctgtataccgtcgacctctagctagagcttggcgtaatcatggtcatagctgtttcctgtgtgaaattgttatccgctcacaattccacacaacatacgagccggaagcataaagtgtaaagcctggggtgcctaatgagtgagctaactcacattaattgcgttgcgctcactgcccgctttccagtcgggaaacctgtcgtgccagctgcattaatgaatcggccaacgcgcggggagaggcggtttgcgtattgggcgctcttccgcttcctcgctcactgactcgctgcgctcggtcgttcggctgcggcgagcggtatcagctcactcaaaggcggtaatacggttatccacagaatcaggggataacgcaggaaagaacatgtgagcaaaaggccagcaaaaggccaggaaccgtaaaaaggccgcgttgctggcgtttttccataggctccgcccccctgacgagcatcacaaaaatcgacgctcaagtcagaggtggcgaaacccgacaggactataaagataccaggcgtttccccctggaagctccctcgtgcgctctcctgttccgaccctgccgcttaccggatacctgtccgcctttctcccttcgggaagcgtggcgctttctcatagctcacgctgtaggtatctcagttcggtgtaggtcgttcgctccaagctgggctgtgtgcacgaaccccccgttcagcccgaccgctgcgccttatccggtaactatcgtcttgagtccaacccggtaagacacgacttatcgccactggcagcagccactggtaacaggattagcagagcgaggtatgtaggcggtgctacagagttcttgaagtggtggcctaactacggctacactagaagaacagtatttggtatctgcgctctgctgaagccagttaccttcggaaaaagagttggtagctcttgatccggcaaacaaaccaccgctggtagcggtggtttttttgtttgcaagcagcagattacgcgcagaaaaaaaggatctcaagaagatcctttgatcttttctacggggtctgacgctcagtggaacgaaaactcacgttaagggattttggtcatgagattatcaaaaaggatcttcacctagatccttttaaattaaaaatgaagttttaaatcaatctaaagtatatatgagtaaacttggtctgacagttaccaatgcttaatcagtgaggcacctatctcagcgatctgtctatttcgttcatccatagttgcctgactccccgtcgtgtagataactacgatacgggagggcttaccatctggccccagtgctgcaatgataccgcgagacccacgctcaccggctccagatttatcagcaataaaccagccagccggaagggccgagcgcagaagtggtcctgcaactttatccgcctccatccagtctattaattgttgccgggaagctagagtaagtagttcgccagttaatagtttgcgcaacgttgttgccattgctacaggcatcgtggtgtcacgctcgtcgtttggtatggcttcattcagctccggttcccaacgatcaaggcgagttacatgatcccccatgttgtgcaaaaaagcggttagctccttcggtcctccgatcgttgtcagaagtaagttggccgcagtgttatcactcatggttatggcagcactgcataattctcttactgtcatgccatccgtaagatgcttttctgtgactggtgagtactcaaccaagtcattctgagaatagtgtatgcggcgaccgagttgctcttgcccggcgtcaatacgggataataccgcgccacatagcagaactttaaaagtgctcatcattggaaaacgttcttcggggcgaaaactctcaaggatcttaccgctgttgagatccagttcgatgtaacccactcgtgcacccaactgatcttcagcatcttttactttcaccagcgtttctgggtgagcaaaaacaggaaggcaaaatgccgcaaaaaagggaataagggcgacacggaaatgttgaatactcatactcttcctttttcaatattattgaagcatttatcagggttattgtctcatgagcggatacatatttgaatgtatttagaaaaataaacaaataggggttccgcgcacatttccccgaaaagtgccacctgacgtcgacggatcgggagatctcccgatcccctatggtgcactctcagtacaatctgctctgatgccgcatagttaagccagtatctgctccctgcttgtgtgttggaggtcgctgagtagtgcgcgagcaaaatttaagctacaacaaggcaaggcttgaccgacaattgcatgaagaatctgcttagggttaggcgttttgcgctgcttcgcgatgtacgggccagatatacgcgttgacattgattattgactagttattaatagtaatcaattacggggtcattagttcatagcccatatatggagttccgcgttacataacttacggtaaatggcccgcctggctgaccgcccaacgacccccgcccattgacgtcaataatgacgtatgttcccatagtaacgccaatagggactttccattgacgtcaatgggtggagtatttacggtaaactgcccacttggcagtacatcaagtgtatcatatgccaagtacgccccctattgacgtcaatgacggtaaatggcccgcctggcattatgcccagtacatgaccttatgggactttcctacttggcagtacatctacgtattagtcatcgctattaccatggtgatgcggttttggcagtacatcaatgggcgtggatagcggtttgactcacggggatttccaagtctccaccccattgacgtcaatgggagtttgttttggcaccaaaatcaacgggactttccaaaatgtcgtaacaactccgccccattgacgcaaatgggcggtaggcgtgtacggtgggaggtctatataagcagcgcgttttgcct

SEQ ID NO: 86 - DNA, 10280 bp, synthetic construct
  misc_feature 1..10280: note = Synthetic: FG12w-SD400i-MND-IgG2H-RMP5
  source 1..10280: mol_type = other DNA
gtactgggtctctctggttagaccagatctgagcctgggagctctctggctaactagggaacccactgcttaagcctcaataaagcttgccttgagtgcttcaagtagtgtgtgcccgtctgttgtgtgactctggtaactagagatccctcagacccttttagtcagtgtggaaaatctctagcagtggcgcccgaacagggacttgaaagcgaaagggaaaccagaggagctctctcgacgcaggactcggcttgctgaagcgcgcacggcaagaggcgaggggcggcgactggtgagtacgccaaaaattttgactagcggaggctagaaggagagagatgggtgcgagagcgtcagtattaagcgggggagaattagatcgcgatgggaaaaaattcggttaaggccagggggaaagaaaaaatataaattaaaacatatagtatgggcaagcagggagctagaacgattcgcagttaatcctggcctgttagaaacatcagaaggctgtagacaaatactgggacagctacaaccatcccttcagacaggatcagaagaacttagatcattatataatacagtagcaaccctctattgtgtgcatcaaaggatagagataaaagacaccaaggaagctttagacaagatagaggaagagcaaaacaaaagtaagaccaccgcacagcaagcggccgctgatcttcagacctggaggaggagatatgagggacaattggagaagtgaattatataaatataaagtagtaaaaattgaaccattaggagtagcacccaccaaggcaaagagaagagtggtgcagagagaaaaaagagcagtgggaataggagctttgttccttgggttcttgggagcagcaggaagcactatgggcgcagcgtcaatgacgctgacggtacaggccagacaattattgtctggtatagtgcagcagcagaacaatttgctgagggctattgaggcgcaacagcatctgttgcaactcacagtctggggcatcaagcagctccaggcaagaatcctggctgtggaaagatacctaaaggatcaacagctcctggggatttggggttgctctggaaaactcatttgcaccactgctgtgccttggaatgctagttggagtaataaatctctggaacagatttggaatcacacgacctggatggagtgggacagagaaattaacaattacacaagcttaatacactccttaattgaagaatcgcaaaaccagcaagaaaagaatgaacaagaattattggaattagataaatgggcaagtttgtggaattggtttaacataacaaattggctgtggtatataaaattattcataatgatagtaggaggcttggtaggtttaagaatagtttttgctgtactttctatagtgaatagagttaggcagggatattcaccattatcgtttcagacccacctcccaaccccgaggggacccgacaggcccgaaggaatagaagaagaaggtggagagagagacagagacagatccattcgattagtgaacggatcggcactgcgtgcgccaattctgcagacaaatggcagtattcatccacaattttaaaagaaaaggggggattggggggtacagtgcaggggaaagaatagtagacataatagcaacagacatacaaactaaagaattacaaaaacaaattacaaaaattcaaaattttcgggtttattacagggacagcagagatccagtttggttaattaagaacagagagacagcagaatatgggccaaacaggatatctgtggtaagcagttcctgccccggctcagggccaagaacagttggaacagcagaatatgggccaaacaggatatctgtggtaagcagttcctgccccggctcagggccaagaacagatggtccccagatgcggtcccgccctcagcagtttctagagaaccatcagatgtttccagggtgccccaaggacctgaaatgaccctgtgccttatttgaactaaccaatcagttcgcttctcgcttctgttcgcgcgcttctgctccccgagctctatataagcagagctcgtttagtgaaccgtcagatccgtacgttcgaagctagcatgggatggtcctgcataatcctttttttggtcgcaacagccacaggtgtgcacagtcttgtccctgaaaaggagaaggaccccaaatattggagagaccaggctcaggaaaccctcaagtacgctcttgaactgcaaaagcttaatactaacgtggctaaaaacgtgataatgttcttgggggacggaatgggggtttcaaccgttaccgcggccagaatcttgaaagggcagctgcaccataacccaggcgaagaaacgaggctggagatggacaaatttccattcgtggcgctttctaagacctacaacactaacgcccaggtccctgactcagctggtacggccactgcctacctttgtggagtgaaggcaaatgaggggactgttggtgtttccgcagctactgagagatctcggtgtaatacgactcaaggtaatgaagttacatccatactccgatgggcaaaagacgcgggcaaatctgttgggattgttacaactactagggtgaaccatgcgacaccctctgcagcttatgcgcacagtgccgaccgagactggtattcagataatgagatgccacccgaggcccttagccagggctgcaaggacatagcctatcaattgatgcacaatatcagagacatagacgttataatgggtggtggtcgcaagtacatgtaccccaaaaacaaaaccgacgtagagtatgaatccgatgaaaaagctaggggcaccagactcgacggacttgatctggttgatacatggaaatcctttaaacctcggtataagcattcacatttcatctggaacaggaccgaacttctcacattggacccccacaatgttgactatctcctcggtttgtttgaaccaggggatatgcagtatgagctcaatcggaacaacgtcactgaccccagtttgagtgaaatggtcgttgttgcaatacaaattttgaggaaaaatccaaaggggtttttcttgttggtagagggcggacggatagatcacgggcaccacgaaggcaaagcaaaacaggccctgcacgaagccgttgaaatggatcgcgctatcggtcaagccggctccctgacgagtagtgaagataccttgaccgtcgtcactgcggatcatagccacgtttttacctttgggggatacacccccaggggcaactcaatttttggacttgcaccgatgctcagcgacacagataaaaagccttttactgcgattctgtatggcaacggccctggatacaaagtagtagggggtgaaagggaaaacgtcagcatggtggactatgcacacaataattatcaggcgcagtccgctgttccgctgcggcatgagactcacgggggagaggacgttgctgtcttttccaagggaccaatggctcatcttctccatggagtccatgagcaaaattatgtccctcatgtcatggcatacgctgcatgtataggagcaaatctcgggcactgtgcaccggcgtcctccgattccagcgacagttcagacagctctgacagctccgattcctccgactcaagttgagaattcgatatcaagcttatcgataatcaacctctggattacaaaatttgtgaaagattgactggtattcttaactatgttgctccttttacgctatgtggatacgctgctttaatgcctttgtatcatgctattgcttcccgtatggctttcattttctcctccttgtataaatcctggttgctgtctctttatgaggagttgtggcccgttgtcaggcaacgtggcgtggtgtgcactgtgtttgctgacgcaacccccactggttggggcattgccaccacctgtcagctcctttccgggactttcgctttccccctccctattgccacggcggaactcatcgccgcctgccttgcccgctgctggacaggggctcggctgttgggcactgacaattccgtggtgttgtcggggaaatcatcgtcctttccttggctgctcgcctgtgttgccacctggattctgcgcgggacgtccttctgctacgtcccttcggccctcaatccagcggaccttccttcccgcggcctgctgccggctctgcggcctcttccgcgtcttcgccttcgccctcagacgagtcggatctccctttgggccgcctccccgcatcgataccgtcgacctcgagacctagaaaaacatggagcaatcacaagtagcaatacagcagctaccaatgctgattgtgcctggctagaagcacaagaggaggaggaggtgggttttccagtcacacctcaggtacctttaagaccaatgacttacaaggcagctgtagatcttagccactttttaaaagaaaaggggggactggaagggctaattcactcccaacgaagacaagatatccttgatctgtggatctaccacacacaaggctacttccctgattggcagaactacacaccagggccagggatcagatatccactgacctttggatggtgctacaagctagtaccagttgagcaagagaaggtagaagaagccaatgaaggagagaacacccgcttgttacaccctgtgagcctgcatgggatggatgacccggagagagaagtattagagtggaggtttgacagccgcctagcatttcatcacatggcccgagagctgcatccggaatccctgcaggcattcaaggccaggctggatgtggctctgggcagcctgggctgctggttgatgaccctgcacatagcagggggttggatctggatgagcactgtgctcctttgcaacccaggccgttctatgattctgtcattctaaatctctctttcagcctaaagctttttccccgtatccccccaggtgtctgcaggctcaaagagcagcgagaagcgttcagaggaaagcgatcccgtgccaccttccccgtgcccgggctgtccccgcacgctgccggctcggggatgcggggggagcgccggaccggagcggagccccgggcggctcgctgctgccccctagcgggggagggacgtaattacatccctgggggctttgggggggggctgtccccgtgagctccccctgtactgggtctctctggttagaccagatctgagcctgggagctctctggctaactagggaacccactgcttaagcctcaataaagcttgccttgagtgcttcaagtagtgtgtgcccgtctgttgtgtgactctggtaactagagatccctcagacccttttagtcagtgtggaaaatctctagcagggcccgtttaaacccgctgatcagcctcgactgtgccttctagttgccagccatctgttgtttgcccctcccccgtgccttccttgaccctggaaggtgccactcccactgtcctttcctaataaaatgaggaaattgcatcgcattgtctgagtaggtgtcattctattctggggggtggggtggggcaggacagcaagggggaggattgggaagacaatagcaggcatgctggggatgcggtgggctctatggcttctgaggcggaaagaaccagctggggctctagggggtatccccacgcgccctgtagcggcgcattaagcgcggcgggtgtggtggttacgcgcagcgtgaccgctacacttgccagcgccctagcgcccgctcctttcgctttcttcccttcctttctcgccacgttcgccggctttccccgtcaagctctaaatcgggggctccctttagggttccgatttagtgctttacggcacctcgaccccaaaaaacttgattagggtgatggttcacgtagtgggccatcgccctgatagacggtttttcgccctttgacgttggagtccacgttctttaatagtggactcttgttccaaactggaacaacactcaaccctatctcggtctattcttttgatttataagggattttgccgatttcggcctattggttaaaaaatgagctgatttaacaaaaatttaacgcgaattaattctgtggaatgtgtgtcagttagggtgtggaaagtccccaggctccccagcaggcagaagtatgcaaagcatgcatctcaattagtcagcaaccaggtgtggaaagtccccaggctccccagcaggcagaagtatgcaaagcatgcatctcaattagtcagcaaccatagtcccgcccctaactccgcccatcccgcccctaactccgcccagttccgcccattctccgccccatggctgactaattttttttatttatgcagaggccgaggccgcctctgcctctgagctattccagaagtagtgaggaggcttttttggaggcctaggcttttgcaaaaagctcccgggagcttgtatatccattttcggatctgatcagcacgtgttgacaattaatcatcggcatagtatatcggcatagtataatacgacaaggtgaggaactaaaccatggccaagttgaccagtgccgttccggtgctcaccgcgcgcgacgtcgccggagcggtcgagttctggaccgaccggctcgggttctcccgggacttcgtggaggacgacttcgccggtgtggtccgggacgacgtgaccctgttcatcagcgcggtccaggaccaggtggtgccggacaacaccctggcctgggtgtgggtgcgcggcctggacgagctgtacgccgagtggtcggaggtcgtgtccacgaacttccgggacgcctccgggccggccatgaccgagatcggcgagcagccgtgggggcgggagttcgccctgcgcgacccggccggcaactgcgtgcacttcgtggccgaggagcaggactgacacgtgctacgagatttcgattccaccgccgccttctatgaaaggttgggcttcggaatcgttttccgggacgccggctggatgatcctccagcgcggggatctcatgctggagttcttcgcccaccccaacttgtttattgcagcttataatggttacaaataaagcaatagcatcacaaatttcacaaataaagcatttttttcactgcattctagttgtggtttgtccaaactcatcaatgtatcttatcatgtctgtataccgtcgacctctagctagagcttggcgtaatcatggtcatagctgtttcctgtgtgaaattgttatccgctcacaattccacacaacatacgagccggaagcataaagtgtaaagcctggggtgcctaatgagtgagctaactcacattaattgcgttgcgctcactgcccgctttccagtcgggaaacctgtcgtgccagctgcattaatgaatcggccaacgcgcggggagaggcggtttgcgtattgggcgctcttccgcttcctcgctcactgactcgctgcgctcggtcgttcggctgcggcgagcggtatcagctcactcaaaggcggtaatacggttatccacagaatcaggggataacgcaggaaagaacatgtgagcaaaaggccagcaaaaggccaggaaccgtaaaaaggccgcgttgctggcgtttttccataggctccgcccccctgacgagcatcacaaaaatcgacgctcaagtcagaggtggcgaaacccgacaggactataaagataccaggcgtttccccctggaagctccctcgtgcgctctcctgttccgaccctgccgcttaccggatacctgtccgcctttctcccttcgggaagcgtggcgctttctcatagctcacgctgtaggtatctcagttcggtgtaggtcgttcgctccaagctgggctgtgtgcacgaaccccccgttcagcccgaccgctgcgccttatccggtaactatcgtcttgagtccaacccggtaagacacgacttatcgccactggcagcagccactggtaacaggattagcagagcgaggtatgtaggcggtgctacagagttcttgaagtggtggcctaactacggctacactagaagaacagtatttggtatctgcgctctgctgaagccagttaccttcggaaaaagagttggtagctcttgatccggcaaacaaaccaccgctggtagcggtggtttttttgtttgcaagcagcagattacgcgcagaaaaaaaggatctcaagaagatcctttgatcttttctacggggtctgacgctcagtggaacgaaaactcacgttaagggattttggtcatgagattatcaaaaaggatcttcacctagatccttttaaattaaaaatgaagttttaaatcaatctaaagtatatatgagtaaacttggtctgacagttaccaatgcttaatcagtgaggcacctatctcagcgatctgtctatttcgttcatccatagttgcctgactccccgtcgtgtagataactacgatacgggagggcttaccatctggccccagtgctgcaatgataccgcgagacccacgctcaccggctccagatttatcagcaataaaccagccagccggaagggccgagcgcagaagtggtcctgcaactttatccgcctccatccagtctattaattgttgccgggaagctagagtaagtagttcgccagttaatagtttgcgcaacgttgttgccattgctacaggcatcgtggtgtcacgctcgtcgtttggtatggcttcattcagctccggttcccaacgatcaaggcgagttacatgatcccccatgttgtgcaaaaaagcggttagctccttcggtcctccgatcgttgtcagaagtaagttggccgcagtgttatcactcatggttatggcagcactgcataattctcttactgtcatgccatccgtaagatgcttttctgtgactggtgagtactcaaccaagtcattctgagaatagtgtatgcggcgaccgagttgctcttgcccggcgtcaatacgggataataccgcgccacatagcagaactttaaaagtgctcatcattggaaaacgttcttcggggcgaaaactctcaaggatcttaccgctgttgagatccagttcgatgtaacccactcgtgcacccaactgatcttcagcatcttttactttcaccagcgtttctgggtgagcaaaaacaggaaggcaaaatgccgcaaaaaagggaataagggcgacacggaaatgttgaatactcatactcttcctttttcaatattattgaagcatttatcagggttattgtctcatgagcggatacatatttgaatgtatttagaaaaataaacaaataggggttccgcgcacatttccccgaaaagtgccacctgacgtcgacggatcgggagatctcccgatcccctatggtgcactctcagtacaatctgctctgatgccgcatagttaagccagtatctgctccctgcttgtgtgttggaggtcgctgagtagtgcgcgagcaaaatttaagctacaacaaggcaaggcttgaccgacaattgcatgaagaatctgcttagggttaggcgttttgcgctgcttcgcgatgtacgggccagatatacgcgttgacattgattattgactagttattaatagtaatcaattacggggtcattagttcatagcccatatatggagttccgcgttacataacttacggtaaatggcccgcctggctgaccgcccaacgacccccgcccattgacgtcaataatgacgtatgttcccatagtaacgccaatagggactttccattgacgtcaatgggtggagtatttacggtaaactgcccacttggcagtacatcaagtgtatcatatgccaagtacgccccctattgacgtcaatgacggtaaatggcccgcctggcattatgcccagtacatgaccttatgggactttcctacttggcagtacatctacgtattagtcatcgctattaccatggtgatgcggttttggcagtacatcaatgggcgtggatagcggtttgactcacggggatttccaagtctccaccccattgacgtcaatgggagtttgttttggcaccaaaatcaacgggactttccaaaatgtcgtaacaactccgccccattgacgcaaatgggcggtaggcgtgtacggtgggaggtctatataagcagcgcgttttgcct

SEQ ID NO: 87 - DNA, 10749 bp, synthetic construct; identical to SEQ ID NO: 24
  misc_feature 1..10749: note = Synthetic: FG12w-Ef1a-IgG2H-RMP5-Fc
  source 1..10749: mol_type = other DNA

SEQ ID NO: 88 - DNA, 10093 bp, synthetic construct
  misc_feature 1..10093: note = Synthetic: EF1a-Kozak-IgG2H- sTNALPwt-DSS6
  source 1..10093: mol_type = other DNA
gtactgggtctctctggttagaccagatctgagcctgggagctctctggctaactagggaacccactgcttaagcctcaataaagcttgccttgagtgcttcaagtagtgtgtgcccgtctgttgtgtgactctggtaactagagatccctcagacccttttagtcagtgtggaaaatctctagcagtggcgcccgaacagggacttgaaagcgaaagggaaaccagaggagctctctcgacgcaggactcggcttgctgaagcgcgcacggcaagaggcgaggggcggcgactggtgagtacgccaaaaattttgactagcggaggctagaaggagagagatgggtgcgagagcgtcagtattaagcgggggagaattagatcgcgatgggaaaaaattcggttaaggccagggggaaagaaaaaatataaattaaaacatatagtatgggcaagcagggagctagaacgattcgcagttaatcctggcctgttagaaacatcagaaggctgtagacaaatactgggacagctacaaccatcccttcagacaggatcagaagaacttagatcattatataatacagtagcaaccctctattgtgtgcatcaaaggatagagataaaagacaccaaggaagctttagacaagatagaggaagagcaaaacaaaagtaagaccaccgcacagcaagcggccgctgatcttcagacctggaggaggagatatgagggacaattggagaagtgaattatataaatataaagtagtaaaaattgaaccattaggagtagcacccaccaaggcaaagagaagagtggtgcagagagaaaaaagagcagtgggaataggagctttgttccttgggttcttgggagcagcaggaagcactatgggcgcagcgtcaatgacgctgacggtacaggccagacaattattgtctggtatagtgcagcagcagaacaatttgctgagggctattgaggcgcaacagcatctgttgcaactcacagtctggggcatcaagcagctccaggcaagaatcctggctgtggaaagatacctaaaggatcaacagctcctggggatttggggttgctctggaaaactcatttgcaccactgctgtgccttggaatgctagttggagtaataaatctctggaacagatttggaatcacacgacctggatggagtgggacagagaaattaacaattacacaagcttaatacactccttaattgaagaatcgcaaaaccagcaagaaaagaatgaacaagaattattggaattagataaatgggcaagtttgtggaattggtttaacataacaaattggctgtggtatataaaattattcataatgatagtaggaggcttggtaggtttaagaatagtttttgctgtactttctatagtgaatagagttaggcagggatattcaccattatcgtttcagacccacctcccaaccccgaggggacccgacaggcccgaaggaatagaagaagaaggtggagagagagacagagacagatccattcgattagtgaacggatcggcactgcgtgcgccaattctgcagacaaatggcagtattcatccacaattttaaaagaaaaggggggattggggggtacagtgcaggggaaagaatagtagacataatagcaacagacatacaaactaaagaattacaaaaacaaattacaaaaattcaaaattttcgggtttattacagggacagcagagatccagtttggttaattaaggatctgcgatcgctccggtgcccgtcagtgggcagagcgcacatcgcccacagtccccgagaagttggggggaggggtcggcaattgaaccggtgcctagagaaggtggcgcggggtaaactgggaaagtgatgtcgtgtactggctccgcctttttcccgagggtgggggagaaccgtatataagtgcagtagtcgccgtgaacgttctttttcgcaacgggtttgccgccagaacacagctgaagcttcgaggggctcgcatctctccttcacgcgcccgccgccctacctgaggccgccatccacgccggttgagtcgcgttctgccgcctcccgcctgtggtgcctcctgaactgcgtccgccgtctaggtaagtttaaagctcaggtcgagaccgggcctttgtccggcgctcccttggagcctacctagactcagccggctctccacgctttgcctgaccctgcttgctcaactctacgtctttgtttcgttttctgttctgcgccgttacagatccaagctgtgaccggcgcctacggatccccgggtaccggtcgtacgttcgaagctagcgccaccatgggatggtcctgcataatcctttttttggtcgcaacagccacaggtgtgcacagtttagtgccagagaaagagaaagaccccaagtactggcgagaccaagcgcaagagacactgaaatatgccctggagcttcagaagctcaacaccaacgtggctaagaatgtcatcatgttcctgggagatgggatgggtgtctccacagtgacggctgcccgcatcctcaagggtcagctccaccacaaccctggggaggagaccaggctggagatggacaagttccccttcgtggccctctccaagacgtacaacaccaatgcccaggtccctgacagtgccggcaccgccaccgcctacctgtgtggggtgaaggccaatgagggcaccgtgggggtaagcgcagccactgagcgttcccggtgcaacaccacccaggggaacgaggtcacctccatcctgcgctgggccaaggacgctgggaaatctgtgggcattgtgaccaccacgagagtgaaccatgccacccccagcgccgcctacgcccactcggctgaccgggactggtactcagacaacgagatgccccctgaggccttgagccagggctgtaaggacatcgcctaccagctcatgcataacatcagggacattgacgtgatcatggggggtggccggaaatacatgtaccccaagaataaaactgatgtggagtatgagagtgacgagaaagccaggggcacgaggctggacggcctggacctcgttgacacctggaagagcttcaaaccgagatacaagcactcccacttcatctggaaccgcacggaactcctgacccttgacccccacaatgtggactacctattgggtctcttcgagccaggggacatgcagtacgagctgaacaggaacaacgtgacggacccgtcactctccgagatggtggtggtggccatccagatcctgcggaagaaccccaaaggcttcttcttgctggtggaaggaggcagaattgaccacgggcaccatgaaggaaaagccaagcaggccctgcatgaggcggtggagatggaccgggccatcgggcaggcaggcagcttgacctcctcggaagacactctgaccgtggtcactgcggaccattcccacgtcttcacatttggtggatacaccccccgtggcaactctatctttggtctggcccccatgctgagtgacacagacaagaagcccttcactgccatcctgtatggcaatgggcctggctacaaggtggtgggcggtgaacgagagaatgtctccatggtggactatgctcacaacaactaccaggcgcagtctgctgtgcccctgcgccacgagacccacggcggggaggacgtggccgtcttctccaagggccccatggcgcacctgctgcacggcgtccacgagcagaactacgtcccccacgtgatggcgtatgcagcctgcatcggggccaacctcggccactgtgctcctgccagctcggattccagcgacagttcagacagctctgacagctccgattcctccgactcaagttgagaattcgatatcaagcttatcgataatcaacctctggattacaaaatttgtgaaagattgactggtattcttaactatgttgctccttttacgctatgtggatacgctgctttaatgcctttgtatcatgctattgcttcccgtatggctttcattttctcctccttgtataaatcctggttgctgtctctttatgaggagttgtggcccgttgtcaggcaacgtggcgtggtgtgcactgtgtttgctgacgcaacccccactggttggggcattgccaccacctgtcagctcctttccgggactttcgctttccccctccctattgccacggcggaactcatcgccgcctgccttgcccgctgctggacaggggctcggctgttgggcactgacaattccgtggtgttgtcggggaaatcatcgtcctttccttggctgctcgcctgtgttgccacctggattctgcgcgggacgtccttctgctacgtcccttcggccctcaatccagcggaccttccttcccgcggcctgctgccggctctgcggcctcttccgcgtcttcgccttcgccctcagacgagtcggatctccctttgggccgcctccccgcatcgataccgtcgacctcgatcgagacctagaaaaacatggagcaatcacaagtagcaatacagcagctaccaatgctgattgtgcctggctagaagcacaagaggaggaggaggtgggttttccagtcacacctcaggtacctttaagaccaatgacttacaaggcagctgtagatcttagccactttttaaaagaaaaggggggactggaagggctaattcactcccaacgaagacaagatatccttgatctgtggatctaccacacacaaggctacttccctgattggcagaactacacaccagggccagggatcagatatccactgacctttggatggtgctacaagctagtaccagttgagcaagagaaggtagaagaagccaatgaaggagagaacacccgcttgttacaccctgtgagcctgcatgggatggatgacccggagagagaagtattagagtggaggtttgacagccgcctagcatttcatcacatggcccgagagctgcatccggactgtactgggtctctctggttagaccagatctgagcctgggagctctctggctaactagggaacccactgcttaagcctcaataaagcttgccttgagtgcttcaagtagtgtgtgcccgtctgttgtgtgactctggtaactagagatccctcagacccttttagtcagtgtggaaaatctctagcagggcccgtttaaacccgctgatcagcctcgactgtgccttctagttgccagccatctgttgtttgcccctcccccgtgccttccttgaccctggaaggtgccactcccactgtcctttcctaataaaatgaggaaattgcatcgcattgtctgagtaggtgtcattctattctggggggtggggtggggcaggacagcaagggggaggattgggaagacaatagcaggcatgctggggatgcggtgggctctatggcttctgaggcggaaagaaccagctggggctctagggggtatccccacgcgccctgtagcggcgcattaagcgcggcgggtgtggtggttacgcgcagcgtgaccgctacacttgccagcgccctagcgcccgctcctttcgctttcttcccttcctttctcgccacgttcgccggctttccccgtcaagctctaaatcgggggctccctttagggttccgatttagtgctttacggcacctcgaccccaaaaaacttgattagggtgatggttcacgtagtgggccatcgccctgatagacggtttttcgccctttgacgttggagtccacgttctttaatagtggactcttgttccaaactggaacaacactcaaccctatctcggtctattcttttgatttataagggattttgccgatttcggcctattggttaaaaaatgagctgatttaacaaaaatttaacgcgaattaattctgtggaatgtgtgtcagttagggtgtggaaagtccccaggctccccagcaggcagaagtatgcaaagcatgcatctcaattagtcagcaaccaggtgtggaaagtccccaggctccccagcaggcagaagtatgcaaagcatgcatctcaattagtcagcaaccatagtcccgcccctaactccgcccatcccgcccctaactccgcccagttccgcccattctccgccccatggctgactaattttttttatttatgcagaggccgaggccgcctctgcctctgagctattccagaagtagtgaggaggcttttttggaggcctaggcttttgcaaaaagctcccgggagcttgtatatccattttcggatctgatcagcacgtgttgacaattaatcatcggcatagtatatcggcatagtataatacgacaaggtgaggaactaaaccatggccaagttgaccagtgccgttccggtgctcaccgcgcgcgacgtcgccggagcggtcgagttctggaccgaccggctcgggttctcccgggacttcgtggaggacgacttcgccggtgtggtccgggacgacgtgaccctgttcatcagcgcggtccaggaccaggtggtgccggacaacaccctggcctgggtgtgggtgcgcggcctggacgagctgtacgccgagtggtcggaggtcgtgtccacgaacttccgggacgcctccgggccggccatgaccgagatcggcgagcagccgtgggggcgggagttcgccctgcgcgacccggccggcaactgcgtgcacttcgtggccgaggagcaggactgacacgtgctacgagatttcgattccaccgccgccttctatgaaaggttgggcttcggaatcgttttccgggacgccggctggatgatcctccagcgcggggatctcatgctggagttcttcgcccaccccaacttgtttattgcagcttataatggttacaaataaagcaatagcatcacaaatttcacaaataaagcatttttttcactgcattctagttgtggtttgtccaaactcatcaatgtatcttatcatgtctgtataccgtcgacctctagctagagcttggcgtaatcatggtcatagctgtttcctgtgtgaaattgttatccgctcacaattccacacaacatacgagccggaagcataaagtgtaaagcctggggtgcctaatgagtgagctaactcacattaattgcgttgcgctcactgcccgctttccagtcgggaaacctgtcgtgccagctgcattaatgaatcggccaacgcgcggggagaggcggtttgcgtattgggcgctcttccgcttcctcgctcactgactcgctgcgctcggtcgttcggctgcggcgagcggtatcagctcactcaaaggcggtaatacggttatccacagaatcaggggataacgcaggaaagaacatgtgagcaaaaggccagcaaaaggccaggaaccgtaaaaaggccgcgttgctggcgtttttccataggctccgcccccctgacgagcatcacaaaaatcgacgctcaagtcagaggtggcgaaacccgacaggactataaagataccaggcgtttccccctggaagctccctcgtgcgctctcctgttccgaccctgccgcttaccggatacctgtccgcctttctcccttcgggaagcgtggcgctttctcatagctcacgctgtaggtatctcagttcggtgtaggtcgttcgctccaagctgggctgtgtgcacgaaccccccgttcagcccgaccgctgcgccttatccggtaactatcgtcttgagtccaacccggtaagacacgacttatcgccactggcagcagccactggtaacaggattagcagagcgaggtatgtaggcggtgctacagagttcttgaagtggtggcctaactacggctacactagaagaacagtatttggtatctgcgctctgctgaagccagttaccttcggaaaaagagttggtagctcttgatccggcaaacaaaccaccgctggtagcggtggtttttttgtttgcaagcagcagattacgcgcagaaaaaaaggatctcaagaagatcctttgatcttttctacggggtctgacgctcagtggaacgaaaactcacgttaagggattttggtcatgagattatcaaaaaggatcttcacctagatccttttaaattaaaaatgaagttttaaatcaatctaaagtatatatgagtaaacttggtctgacagttaccaatgcttaatcagtgaggcacctatctcagcgatctgtctatttcgttcatccatagttgcctgactccccgtcgtgtagataactacgatacgggagggcttaccatctggccccagtgctgcaatgataccgcgagacccacgctcaccggctccagatttatcagcaataaaccagccagccggaagggccgagcgcagaagtggtcctgcaactttatccgcctccatccagtctattaattgttgccgggaagctagagtaagtagttcgccagttaatagtttgcgcaacgttgttgccattgctacaggcatcgtggtgtcacgctcgtcgtttggtatggcttcattcagctccggttcccaacgatcaaggcgagttacatgatcccccatgttgtgcaaaaaagcggttagctccttcggtcctccgatcgttgtcagaagtaagttggccgcagtgttatcactcatggttatggcagcactgcataattctcttactgtcatgccatccgtaagatgcttttctgtgactggtgagtactcaaccaagtcattctgagaatagtgtatgcggcgaccgagttgctcttgcccggcgtcaatacgggataataccgcgccacatagcagaactttaaaagtgctcatcattggaaaacgttcttcggggcgaaaactctcaaggatcttaccgctgttgagatccagttcgatgtaacccactcgtgcacccaactgatcttcagcatcttttactttcaccagcgtttctgggtgagcaaaaacaggaaggcaaaatgccgcaaaaaagggaataagggcgacacggaaatgttgaatactcatactcttcctttttcaatattattgaagcatttatcagggttattgtctcatgagcggatacatatttgaatgtatttagaaaaataaacaaataggggttccgcgcacatttccccgaaaagtgccacctgacgtcgacggatcgggagatctcccgatcccctatggtgcactctcagtacaatctgctctgatgccgcatagttaagccagtatctgctccctgcttgtgtgttggaggtcgctgagtagtgcgcgagcaaaatttaagctacaacaaggcaaggcttgaccgacaattgcatgaagaatctgcttagggttaggcgttttgcgctgcttcgcgatgtacgggccagatatacgcgttgacattgattattgactagttattaatagtaatcaattacggggtcattagttcatagcccatatatggagttccgcgttacataacttacggtaaatggcccgcctggctgaccgcccaacgacccccgcccattgacgtcaataatgacgtatgttcccatagtaacgccaatagggactttccattgacgtcaatgggtggagtatttacggtaaactgcccacttggcagtacatcaagtgtatcatatgccaagtacgccccctattgacgtcaatgacggtaaatggcccgcctggcattatgcccagtacatgaccttatgggactttcctacttggcagtacatctacgtattagtcatcgctattaccatggtgatgcggttttggcagtacatcaatgggcgtggatagcggtttgactcacggggatttccaagtctccaccccattgacgtcaatgggagtttgttttggcaccaaaatcaacgggactttccaaaatgtcgtaacaactccgccccattgacgcaaatgggcggtaggcgtgtacggtgggaggtctatataagcagcgcgttttgcct

SEQ ID NO: 89 - DNA, 10786 bp, synthetic construct
  misc_feature 1..10786: note = Synthetic: EF1a-IgG2H-Kozak-sTNALPwt-Fc-DSS6
  source 1..10786: mol_type = other DNA
gtactgggtctctctggttagaccagatctgagcctgggagctctctggctaactagggaacccactgcttaagcctcaataaagcttgccttgagtgcttcaagtagtgtgtgcccgtctgttgtgtgactctggtaactagagatccctcagacccttttagtcagtgtggaaaatctctagcagtggcgcccgaacagggacttgaaagcgaaagggaaaccagaggagctctctcgacgcaggactcggcttgctgaagcgcgcacggcaagaggcgaggggcggcgactggtgagtacgccaaaaattttgactagcggaggctagaaggagagagatgggtgcgagagcgtcagtattaagcgggggagaattagatcgcgatgggaaaaaattcggttaaggccagggggaaagaaaaaatataaattaaaacatatagtatgggcaagcagggagctagaacgattcgcagttaatcctggcctgttagaaacatcagaaggctgtagacaaatactgggacagctacaaccatcccttcagacaggatcagaagaacttagatcattatataatacagtagcaaccctctattgtgtgcatcaaaggatagagataaaagacaccaaggaagctttagacaagatagaggaagagcaaaacaaaagtaagaccaccgcacagcaagcggccgctgatcttcagacctggaggaggagatatgagggacaattggagaagtgaattatataaatataaagtagtaaaaattgaaccattaggagtagcacccaccaaggcaaagagaagagtggtgcagagagaaaaaagagcagtgggaataggagctttgttccttgggttcttgggagcagcaggaagcactatgggcgcagcgtcaatgacgctgacggtacaggccagacaattattgtctggtatagtgcagcagcagaacaatttgctgagggctattgaggcgcaacagcatctgttgcaactcacagtctggggcatcaagcagctccaggcaagaatcctggctgtggaaagatacctaaaggatcaacagctcctggggatttggggttgctctggaaaactcatttgcaccactgctgtgccttggaatgctagttggagtaataaatctctggaacagatttggaatcacacgacctggatggagtgggacagagaaattaacaattacacaagcttaatacactccttaattgaagaatcgcaaaaccagcaagaaaagaatgaacaagaattattggaattagataaatgggcaagtttgtggaattggtttaacataacaaattggctgtggtatataaaattattcataatgatagtaggaggcttggtaggtttaagaatagtttttgctgtactttctatagtgaatagagttaggcagggatattcaccattatcgtttcagacccacctcccaaccccgaggggacccgacaggcccgaaggaatagaagaagaaggtggagagagagacagagacagatccattcgattagtgaacggatcggcactgcgtgcgccaattctgcagacaaatggcagtattcatccacaattttaaaagaaaaggggggattggggggtacagtgcaggggaaagaatagtagacataatagcaacagacatacaaactaaagaattacaaaaacaaattacaaaaattcaaaattttcgggtttattacagggacagcagagatccagtttggttaattaaggatctgcgatcgctccggtgcccgtcagtgggcagagcgcacatcgcccacagtccccgagaagttggggggaggggtcggcaattgaaccggtgcctagagaaggtggcgcggggtaaactgggaaagtgatgtcgtgtactggctccgcctttttcccgagggtgggggagaaccgtatataagtgcagtagtcgccgtgaacgttctttttcgcaacgggtttgccgccagaacacagctgaagcttcgaggggctcgcatctctccttcacgcgcccgccgccctacctgaggccgccatccacgccggttgagtcgcgttctgccgcctcccgcctgtggtgcctcctgaactgcgtccgccgtctaggtaagtttaaagctcaggtcgagaccgggcctttgtccggcgctcccttggagcctacctagactcagccggctctccacgctttgcctgaccctgcttgctcaactctacgtctttgtttcgttttctgttctgcgccgttacagatccaagctgtgaccggcgcctacggatccccgggtaccggtcgtacgttcgaagctagcgccaccatgggatggtcctgcataatcctttttttggtcgcaacagccacaggtgtgcacagtttagtgccagagaaagagaaagaccccaagtactggcgagaccaagcgcaagagacactgaaatatgccctggagcttcagaagctcaacaccaacgtggctaagaatgtcatcatgttcctgggagatgggatgggtgtctccacagtgacggctgcccgcatcctcaagggtcagctccaccacaaccctggggaggagaccaggctggagatggacaagttccccttcgtggccctctccaagacgtacaacaccaatgcccaggtccctgacagtgccggcaccgccaccgcctacctgtgtggggtgaaggccaatgagggcaccgtgggggtaagcgcagccactgagcgttcccggtgcaacaccacccaggggaacgaggtcacctccatcctgcgctgggccaaggacgctgggaaatctgtgggcattgtgaccaccacgagagtgaaccatgccacccccagcgccgcctacgcccactcggctgaccgggactggtactcagacaacgagatgccccctgaggccttgagccagggctgtaaggacatcgcctaccagctcatgcataacatcagggacattgacgtgatcatggggggtggccggaaatacatgtaccccaagaataaaactgatgtggagtatgagagtgacgagaaagccaggggcacgaggctggacggcctggacctcgttgacacctggaagagcttcaaaccgagatacaagcactcccacttcatctggaaccgcacggaactcctgacccttgacccccacaatgtggactacctattgggtctcttcgagccaggggacatgcagtacgagctgaacaggaacaacgtgacggacccgtcactctccgagatggtggtggtggccatccagatcctgcggaagaaccccaaaggcttcttcttgctggtggaaggaggcagaattgaccacgggcaccatgaaggaaaagccaagcaggccctgcatgaggcggtggagatggaccgggccatcgggcaggcaggcagcttgacctcctcggaagacactctgaccgtggtcactgcggaccattcccacgtcttcacatttggtggatacaccccccgtggcaactctatctttggtctggcccccatgctgagtgacacagacaagaagcccttcactgccatcctgtatggcaatgggcctggctacaaggtggtgggcggtgaacgagagaatgtctccatggtggactatgctcacaacaactaccaggcgcagtctgctgtgcccctgcgccacgagacccacggcggggaggacgtggccgtcttctccaagggccccatggcgcacctgctgcacggcgtccacgagcagaactacgtcccccacgtgatggcgtatgcagcctgcatcggggccaacctcggccactgtgctcctgccagctcgctcaaagacaaaacacacacttgtccaccttgcccggcacctgaacttctgggcggcccgagcgtttttttgttccctcctaaacctaaggacacgctcatgatcagccgcacgccagaggttacctgtgtagtggtggatgtcagccacgaggatccggaagtaaaattcaactggtatgtagatggggtggaggttcacaatgccaaaaccaagccacgagaggaacagtacaatagtacttaccgggtcgtgtctgtattgaccgtcctgcatcaggattggttgaacgggaaagaatataagtgcaaggtgagcaacaaagcacttccggccccaatagagaaaacaattagtaaagcaaaaggacaaccacgggaaccgcaagtttatacactgccgccctctcgagacgagctgaccaaaaatcaggttagccttacatgtttggtcaaggggttctacccgagtgatattgcagtggaatgggaatccaacggtcaaccagaaaataactacaaaactactccgccggtgttggattcagacggctctttctttctgtatagcaaactcactgttgacaagtcaagatggcagcagggcaatgtatttagctgtagtgttatgcacgaagctcttcataaccactacacacaaaagtcactttctctttccccaggaaaagacatcgattccagcgacagttcagacagctctgacagctccgattcctccgactcaagttgagaattcgatatcaagcttatcgataatcaacctctggattacaaaatttgtgaaagattgactggtattcttaactatgttgctccttttacgctatgtggatacgctgctttaatgcctttgtatcatgctattgcttcccgtatggctttcattttctcctccttgtataaatcctggttgctgtctctttatgaggagttgtggcccgttgtcaggcaacgtggcgtggtgtgcactgtgtttgctgacgcaacccccactggttggggcattgccaccacctgtcagctcctttccgggactttcgctttccccctccctattgccacggcggaactcatcgccgcctgccttgcccgctgctggacaggggctcggctgttgggcactgacaattccgtggtgttgtcggggaaatcatcgtcctttccttggctgctcgcctgtgttgccacctggattctgcgcgggacgtccttctgctacgtcccttcggccctcaatccagcggaccttccttcccgcggcctgctgccggctctgcggcctcttccgcgtcttcgccttcgccctcagacgagtcggatctccctttgggccgcctccccgcatcgataccgtcgacctcgatcgagacctagaaaaacatggagcaatcacaagtagcaatacagcagctaccaatgctgattgtgcctggctagaagcacaagaggaggaggaggtgggttttccagtcacacctcaggtacctttaagaccaatgacttacaaggcagctgtagatcttagccactttttaaaagaaaaggggggactggaagggctaattcactcccaacgaagacaagatatccttgatctgtggatctaccacacacaaggctacttccctgattggcagaactacacaccagggccagggatcagatatccactgacctttggatggtgctacaagctagtaccagttgagcaagagaaggtagaagaagccaatgaaggagagaacacccgcttgttacaccctgtgagcctgcatgggatggatgacccggagagagaagtattagagtggaggtttgacagccgcctagcatttcatcacatggcccgagagctgcatccggactgtactgggtctctctggttagaccagatctgagcctgggagctctctggctaactagggaacccactgcttaagcctcaataaagcttgccttgagtgcttcaagtagtgtgtgcccgtctgttgtgtgactctggtaactagagatccctcagacccttttagtcagtgtggaaaatctctagcagggcccgtttaaacccgctgatcagcctcgactgtgccttctagttgccagccatctgttgtttgcccctcccccgtgccttccttgaccctggaaggtgccactcccactgtcctttcctaataaaatgaggaaattgcatcgcattgtctgagtaggtgtcattctattctggggggtggggtggggcaggacagcaagggggaggattgggaagacaatagcaggcatgctggggatgcggtgggctctatggcttctgaggcggaaagaaccagctggggctctagggggtatccccacgcgccctgtagcggcgcattaagcgcggcgggtgtggtggttacgcgcagcgtgaccgctacacttgccagcgccctagcgcccgctcctttcgctttcttcccttcctttctcgccacgttcgccggctttccccgtcaagctctaaatcgggggctccctttagggttccgatttagtgctttacggcacctcgaccccaaaaaacttgattagggtgatggttcacgtagtgggccatcgccctgatagacggtttttcgccctttgacgttggagtccacgttctttaatagtggactcttgttccaaactggaacaacactcaaccctatctcggtctattcttttgatttataagggattttgccgatttcggcctattggttaaaaaatgagctgatttaacaaaaatttaacgcgaattaattctgtggaatgtgtgtcagttagggtgtggaaagtccccaggctccccagcaggcagaagtatgcaaagcatgcatctcaattagtcagcaaccaggtgtggaaagtccccaggctccccagcaggcagaagtatgcaaagcatgcatctcaattagtcagcaaccatagtcccgcccctaactccgcccatcccgcccctaactccgcccagttccgcccattctccgccccatggctgactaattttttttatttatgcagaggccgaggccgcctctgcctctgagctattccagaagtagtgaggaggcttttttggaggcctaggcttttgcaaaaagctcccgggagcttgtatatccattttcggatctgatcagcacgtgttgacaattaatcatcggcatagtatatcggcatagtataatacgacaaggtgaggaactaaaccatggccaagttgaccagtgccgttccggtgctcaccgcgcgcgacgtcgccggagcggtcgagttctggaccgaccggctcgggttctcccgggacttcgtggaggacgacttcgccggtgtggtccgggacgacgtgaccctgttcatcagcgcggtccaggaccaggtggtgccggacaacaccctggcctgggtgtgggtgcgcggcctggacgagctgtacgccgagtggtcggaggtcgtgtccacgaacttccgggacgcctccgggccggccatgaccgagatcggcgagcagccgtgggggcgggagttcgccctgcgcgacccggccggcaactgcgtgcacttcgtggccgaggagcaggactgacacgtgctacgagatttcgattccaccgccgccttctatgaaaggttgggcttcggaatcgttttccgggacgccggctggatgatcctccagcgcggggatctcatgctggagttcttcgcccaccccaacttgtttattgcagcttataatggttacaaataaagcaatagcatcacaaatttcacaaataaagcatttttttcactgcattctagttgtggtttgtccaaactcatcaatgtatcttatcatgtctgtataccgtcgacctctagctagagcttggcgtaatcatggtcatagctgtttcctgtgtgaaattgttatccgctcacaattccacacaacatacgagccggaagcataaagtgtaaagcctggggtgcctaatgagtgagctaactcacattaattgcgttgcgctcactgcccgctttccagtcgggaaacctgtcgtgccagctgcattaatgaatcggccaacgcgcggggagaggcggtttgcgtattgggcgctcttccgcttcctcgctcactgactcgctgcgctcggtcgttcggctgcggcgagcggtatcagctcactcaaaggcggtaatacggttatccacagaatcaggggataacgcaggaaagaacatgtgagcaaaaggccagcaaaaggccaggaaccgtaaaaaggccgcgttgctggcgtttttccataggctccgcccccctgacgagcatcacaaaaatcgacgctcaagtcagaggtggcgaaacccgacaggactataaagataccaggcgtttccccctggaagctccctcgtgcgctctcctgttccgaccctgccgcttaccggatacctgtccgcctttctcccttcgggaagcgtggcgctttctcatagctcacgctgtaggtatctcagttcggtgtaggtcgttcgctccaagctgggctgtgtgcacgaaccccccgttcagcccgaccgctgcgccttatccggtaactatcgtcttgagtccaacccggtaagacacgacttatcgccactggcagcagccactggtaacaggattagcagagcgaggtatgtaggcggtgctacagagttcttgaagtggtggcctaactacggctacactagaagaacagtatttggtatctgcgctctgctgaagccagttaccttcggaaaaagagttggtagctcttgatccggcaaacaaaccaccgctggtagcggtggtttttttgtttgcaagcagcagattacgcgcagaaaaaaaggatctcaagaagatcctttgatcttttctacggggtctgacgctcagtggaacgaaaactcacgttaagggattttggtcatgagattatcaaaaaggatcttcacctagatccttttaaattaaaaatgaagttttaaatcaatctaaagtatatatgagtaaacttggtctgacagttaccaatgcttaatcagtgaggcacctatctcagcgatctgtctatttcgttcatccatagttgcctgactccccgtcgtgtagataactacgatacgggagggcttaccatctggccccagtgctgcaatgataccgcgagacccacgctcaccggctccagatttatcagcaataaaccagccagccggaagggccgagcgcagaagtggtcctgcaactttatccgcctccatccagtctattaattgttgccgggaagctagagtaagtagttcgccagttaatagtttgcgcaacgttgttgccattgctacaggcatcgtggtgtcacgctcgtcgtttggtatggcttcattcagctccggttcccaacgatcaaggcgagttacatgatcccccatgttgtgcaaaaaagcggttagctccttcggtcctccgatcgttgtcagaagtaagttggccgcagtgttatcactcatggttatggcagcactgcataattctcttactgtcatgccatccgtaagatgcttttctgtgactggtgagtactcaaccaagtcattctgagaatagtgtatgcggcgaccgagttgctcttgcccggcgtcaatacgggataataccgcgccacatagcagaactttaaaagtgctcatcattggaaaacgttcttcggggcgaaaactctcaaggatcttaccgctgttgagatccagttcgatgtaacccactcgtgcacccaactgatcttcagcatcttttactttcaccagcgtttctgggtgagcaaaaacaggaaggcaaaatgccgcaaaaaagggaataagggcgacacggaaatgttgaatactcatactcttcctttttcaatattattgaagcatttatcagggttattgtctcatgagcggatacatatttgaatgtatttagaaaaataaacaaataggggttccgcgcacatttccccgaaaagtgccacctgacgtcgacggatcgggagatctcccgatcccctatggtgcactctcagtacaatctgctctgatgccgcatagttaagccagtatctgctccctgcttgtgtgttggaggtcgctgagtagtgcgcgagcaaaatttaagctacaacaaggcaaggcttgaccgacaattgcatgaagaatctgcttagggttaggcgttttgcgctgcttcgcgatgtacgggccagatatacgcgttgacattgattattgactagttattaatagtaatcaattacggggtcattagttcatagcccatatatggagttccgcgttacataacttacggtaaatggcccgcctggctgaccgcccaacgacccccgcccattgacgtcaataatgacgtatgttcccatagtaacgccaatagggactttccattgacgtcaatgggtggagtatttacggtaaactgcccacttggcagtacatcaagtgtatcatatgccaagtacgccccctattgacgtcaatgacggtaaatggcccgcctggcattatgcccagtacatgaccttatgggactttcctacttggcagtacatctacgtattagtcatcgctattaccatggtgatgcggttttggcagtacatcaatgggcgtggatagcggtttgactcacggggatttccaagtctccaccccattgacgtcaatgggagtttgttttggcaccaaaatcaacgggactttccaaaatgtcgtaacaactccgccccattgacgcaaatgggcggtaggcgtgtacggtgggaggtctatataagcagcgcgttttgcct

SEQ ID NO: 90 - DNA, 10800 bp, synthetic construct
  misc_feature 1..10800: note = Synthetic: EF1a-Kozak-IgKVIII-RMP5-miR362-A-Fc-Dss6
  source 1..10800: mol_type = other DNA
gtactgggtctctctggttagaccagatctgagcctgggagctctctggctaactagggaacccactgcttaagcctcaataaagcttgccttgagtgcttcaagtagtgtgtgcccgtctgttgtgtgactctggtaactagagatccctcagacccttttagtcagtgtggaaaatctctagcagtggcgcccgaacagggacttgaaagcgaaagggaaaccagaggagctctctcgacgcaggactcggcttgctgaagcgcgcacggcaagaggcgaggggcggcgactggtgagtacgccaaaaattttgactagcggaggctagaaggagagagatgggtgcgagagcgtcagtattaagcgggggagaattagatcgcgatgggaaaaaattcggttaaggccagggggaaagaaaaaatataaattaaaacatatagtatgggcaagcagggagctagaacgattcgcagttaatcctggcctgttagaaacatcagaaggctgtagacaaatactgggacagctacaaccatcccttcagacaggatcagaagaacttagatcattatataatacagtagcaaccctctattgtgtgcatcaaaggatagagataaaagacaccaaggaagctttagacaagatagaggaagagcaaaacaaaagtaagaccaccgcacagcaagcggccgctgatcttcagacctggaggaggagatatgagggacaattggagaagtgaattatataaatataaagtagtaaaaattgaaccattaggagtagcacccaccaaggcaaagagaagagtggtgcagagagaaaaaagagcagtgggaataggagctttgttccttgggttcttgggagcagcaggaagcactatgggcgcagcgtcaatgacgctgacggtacaggccagacaattattgtctggtatagtgcagcagcagaacaatttgctgagggctattgaggcgcaacagcatctgttgcaactcacagtctggggcatcaagcagctccaggcaagaatcctggctgtggaaagatacctaaaggatcaacagctcctggggatttggggttgctctggaaaactcatttgcaccactgctgtgccttggaatgctagttggagtaataaatctctggaacagatttggaatcacacgacctggatggagtgggacagagaaattaacaattacacaagcttaatacactccttaattgaagaatcgcaaaaccagcaagaaaagaatgaacaagaattattggaattagataaatgggcaagtttgtggaattggtttaacataacaaattggctgtggtatataaaattattcataatgatagtaggaggcttggtaggtttaagaatagtttttgctgtactttctatagtgaatagagttaggcagggatattcaccattatcgtttcagacccacctcccaaccccgaggggacccgacaggcccgaaggaatagaagaagaaggtggagagagagacagagacagatccattcgattagtgaacggatcggcactgcgtgcgccaattctgcagacaaatggcagtattcatccacaattttaaaagaaaaggggggattggggggtacagtgcaggggaaagaatagtagacataatagcaacagacatacaaactaaagaattacaaaaacaaattacaaaaattcaaaattttcgggtttattacagggacagcagagatccagtttggttaattaaggatctgcgatcgctccggtgcccgtcagtgggcagagcgcacatcgcccacagtccccgagaagttggggggaggggtcggcaattgaaccggtgcctagagaaggtggcgcggggtaaactgggaaagtgatgtcgtgtactggctccgcctttttcccgagggtgggggagaaccgtatataagtgcagtagtcgccgtgaacgttctttttcgcaacgggtttgccgccagaacacagctgaagcttcgaggggctcgcatctctccttcacgcgcccgccgccctacctgaggccgccatccacgccggttgagtcgcgttctgccgcctcccgcctgtggtgcctcctgaactgcgtccgccgtctaggtaagtttaaagctcaggtcgagaccgggcctttgtccggcgctcccttggagcctacctagactcagccggctctccacgctttgcctgaccctgcttgctcaactctacgtctttgtttcgttttctgttctgcgccgttacagatccaagctgtgaccggcgcctaggatccccgggtaccggtcgtacgttcgaagctagcgccaccatggatatgcgcgtacccgctcaacttctgggtttgttgctgctttggctcaggggagcccgctgtgccgcgcttgtccctgaaaaggagaaggaccccaaatattggagagaccaggctcaggaaaccctcaagtacgctcttgaactgcaaaagcttaatactaacgtggctaaaaacgtgataatgttcttgggggacggaatgggggtttcaaccgttaccgcggccagaatcttgaaagggcagctgcaccataacccaggcgaagaaacgaggctggagatggacaaatttccattcgtggcgctttctaagacctacaacactaacgcccaggtccctgactcagctggtacggccactgcctacctttgtggagtgaaggcaaatgaggggactgttggtgtttccgcagctactgagagatctcggtgtaatacgactcaaggtaatgaagttacatccatactccgatgggcaaaagacgcgggcaaatctgttgggattgttacaactactagggtgaaccatgcgacaccctctgcagcttatgcgcacagtgccgaccgagactggtattcagataatgagatgccacccgaggcccttagccagggctgcaaggacatagcctatcaattgatgcacaatatcagagacatagacgttataatgggtggtggtcgcaagtacatgtaccccaaaaacaaaaccgacgtagagtatgaatccgatgaaaaagctaggggcaccagactcgacggacttgatctggttgatacatggaagagcttcaagcccagatacaagcattcacatttcatctggaacaggaccgaacttctcacattggacccccacaatgttgactatctcctcggtttgtttgaaccaggggatatgcagtatgagctcaatcggaacaacgtcactgaccccagtttgagtgaaatggtcgttgttgcaatacaaattttgaggaaaaatccaaaggggtttttcttgttggtagagggcggacggatagatcacgggcaccacgaaggcaaagcaaaacaggccctgcacgaagccgttgaaatggatcgcgctatcggtcaagccggctccctgacgagtagtgaagataccttgaccgtcgtcactgcggatcatagccacgtttttacctttgggggatacacccccaggggcaactcaatttttggacttgcaccgatgctcagcgacacagataaaaagccttttactgcgattctgtatggcaacggccctggatacaaagtagtagggggtgaaagggaaaacgtcagcatggtggactatgcacacaataattatcaggcgcagtccgctgttccgctgcggcatgagactcacgggggagaggacgttgctgtcttttccaagggaccaatggctcatcttctccatggagtccatgagcaaaattatgtccctcatgtcatggcatacgctgcatgtataggagcaaatctcgggcactgtgcaccggcgtcctccctcaaagacaaaacacacacttgtccaccttgcccggcacctgaacttctgggcggcccgagcgtttttttgttccctcctaaacctaaggacacgctcatgatcagccgcacgccagaggttacctgtgtagtggtggatgtcagccacgaggatccggaagtaaaattcaactggtatgtagatggggtggaggttcacaatgccaaaaccaagccacgagaggaacagtacaatagtacttaccgggtcgtgtctgtattgaccgtcctgcatcaggattggttgaacgggaaagaatataagtgcaaggtgagcaacaaagcacttccggccccaatagagaaaacaattagtaaagcaaaaggacaaccacgggaaccgcaagtttatacactgccgccctctcgagacgagctgaccaaaaatcaggttagccttacatgtttggtcaaggggttctacccgagtgatattgcagtggaatgggaatccaacggtcaaccagaaaataactacaaaactactccgccggtgttggattcagacggctctttctttctgtatagcaaactcactgttgacaagtcaagatggcagcagggcaatgtatttagctgtagtgttatgcacgaagctcttcataaccactacacacaaaagtcactttctctttccccaggaaaagacatcgattccagcgacagttcagacagctctgacagctccgattcctccgactcaagttgagaattcgatatcaagcttatcgataatcaacctctggattacaaaatttgtgaaagattgactggtattcttaactatgttgctccttttacgctatgtggatacgctgctttaatgcctttgtatcatgctattgcttcccgtatggctttcattttctcctccttgtataaatcctggttgctgtctctttatgaggagttgtggcccgttgtcaggcaacgtggcgtggtgtgcactgtgtttgctgacgcaacccccactggttggggcattgccaccacctgtcagctcctttccgggactttcgctttccccctccctattgccacggcggaactcatcgccgcctgccttgcccgctgctggacaggggctcggctgttgggcactgacaattccgtggtgttgtcggggaaatcatcgtcctttccttggctgctcgcctgtgttgccacctggattctgcgcgggacgtccttctgctacgtcccttcggccctcaatccagcggaccttccttcccgcggcctgctgccggctctgcggcctcttccgcgtcttcgccttcgccctcagacgagtcggatctccctttgggccgcctccccgcatcgataccgtcgacctcgatcgagacctagaaaaacatggagcaatcacaagtagcaatacagcagctaccaatgctgattgtgcctggctagaagcacaagaggaggaggaggtgggttttccagtcacacctcaggtacctttaagaccaatgacttacaaggcagctgtagatcttagccactttttaaaagaaaaggggggactggaagggctaattcactcccaacgaagacaagatatccttgatctgtggatctaccacacacaaggctacttccctgattggcagaactacacaccagggccagggatcagatatccactgacctttggatggtgctacaagctagtaccagttgagcaagagaaggtagaagaagccaatgaaggagagaacacccgcttgttacaccctgtgagcctgcatgggatggatgacccggagagagaagtattagagtggaggtttgacagccgcctagcatttcatcacatggcccgagagctgcatccggactgtactgggtctctctggttagaccagatctgagcctgggagctctctggctaactagggaacccactgcttaagcctcaataaagcttgccttgagtgcttcaagtagtgtgtgcccgtctgttgtgtgactctggtaactagagatccctcagacccttttagtcagtgtggaaaatctctagcagggcccgtttaaacccgctgatcagcctcgactgtgccttctagttgccagccatctgttgtttgcccctcccccgtgccttccttgaccctggaaggtgccactcccactgtcctttcctaataaaatgaggaaattgcatcgcattgtctgagtaggtgtcattctattctggggggtggggtggggcaggacagcaagggggaggattgggaagacaatagcaggcatgctggggatgcggtgggctctatggcttctgaggcggaaagaaccagctggggctctagggggtatccccacgcgccctgtagcggcgcattaagcgcggcgggtgtggtggttacgcgcagcgtgaccgctacacttgccagcgccctagcgcccgctcctttcgctttcttcccttcctttctcgccacgttcgccggctttccccgtcaagctctaaatcgggggctccctttagggttccgatttagtgctttacggcacctcgaccccaaaaaacttgattagggtgatggttcacgtagtgggccatcgccctgatagacggtttttcgccctttgacgttggagtccacgttctttaatagtggactcttgttccaaactggaacaacactcaaccctatctcggtctattcttttgatttataagggattttgccgatttcggcctattggttaaaaaatgagctgatttaacaaaaatttaacgcgaattaattctgtggaatgtgtgtcagttagggtgtggaaagtccccaggctccccagcaggcagaagtatgcaaagcatgcatctcaattagtcagcaaccaggtgtggaaagtccccaggctccccagcaggcagaagtatgcaaagcatgcatctcaattagtcagcaaccatagtcccgcccctaactccgcccatcccgcccctaactccgcccagttccgcccattctccgccccatggctgactaattttttttatttatgcagaggccgaggccgcctctgcctctgagctattccagaagtagtgaggaggcttttttggaggcctaggcttttgcaaaaagctcccgggagcttgtatatccattttcggatctgatcagcacgtgttgacaattaatcatcggcatagtatatcggcatagtataatacgacaaggtgaggaactaaaccatggccaagttgaccagtgccgttccggtgctcaccgcgcgcgacgtcgccggagcggtcgagttctggaccgaccggctcgggttctcccgggacttcgtggaggacgacttcgccggtgtggtccgggacgacgtgaccctgttcatcagcgcggtccaggaccaggtggtgccggacaacaccctggcctgggtgtgggtgcgcggcctggacgagctgtacgccgagtggtcggaggtcgtgtccacgaacttccgggacgcctccgggccggccatgaccgagatcggcgagcagccgtgggggcgggagttcgccctgcgcgacccggccggcaactgcgtgcacttcgtggccgaggagcaggactgacacgtgctacgagatttcgattccaccgccgccttctatgaaaggttgggcttcggaatcgttttccgggacgccggctggatgatcctccagcgcggggatctcatgctggagttcttcgcccaccccaacttgtttattgcagcttataatggttacaaataaagcaatagcatcacaaatttcacaaataaagcatttttttcactgcattctagttgtggtttgtccaaactcatcaatgtatcttatcatgtctgtataccgtcgacctctagctagagcttggcgtaatcatggtcatagctgtttcctgtgtgaaattgttatccgctcacaattccacacaacatacgagccggaagcataaagtgtaaagcctggggtgcctaatgagtgagctaactcacattaattgcgttgcgctcactgcccgctttccagtcgggaaacctgtcgtgccagctgcattaatgaatcggccaacgcgcggggagaggcggtttgcgtattgggcgctcttccgcttcctcgctcactgactcgctgcgctcggtcgttcggctgcggcgagcggtatcagctcactcaaaggcggtaatacggttatccacagaatcaggggataacgcaggaaagaacatgtgagcaaaaggccagcaaaaggccaggaaccgtaaaaaggccgcgttgctggcgtttttccataggctccgcccccctgacgagcatcacaaaaatcgacgctcaagtcagaggtggcgaaacccgacaggactataaagataccaggcgtttccccctggaagctccctcgtgcgctctcctgttccgaccctgccgcttaccggatacctgtccgcctttctcccttcgggaagcgtggcgctttctcatagctcacgctgtaggtatctcagttcggtgtaggtcgttcgctccaagctgggctgtgtgcacgaaccccccgttcagcccgaccgctgcgccttatccggtaactatcgtcttgagtccaacccggtaagacacgacttatcgccactggcagcagccactggtaacaggattagcagagcgaggtatgtaggcggtgctacagagttcttgaagtggtggcctaactacggctacactagaagaacagtatttggtatctgcgctctgctgaagccagttaccttcggaaaaagagttggtagctcttgatccggcaaacaaaccaccgctggtagcggtggtttttttgtttgcaagcagcagattacgcgcagaaaaaaaggatctcaagaagatcctttgatcttttctacggggtctgacgctcagtggaacgaaaactcacgttaagggattttggtcatgagattatcaaaaaggatcttcacctagatccttttaaattaaaaatgaagttttaaatcaatctaaagtatatatgagtaaacttggtctgacagttaccaatgcttaatcagtgaggcacctatctcagcgatctgtctatttcgttcatccatagttgcctgactccccgtcgtgtagataactacgatacgggagggcttaccatctggccccagtgctgcaatgataccgcgagacccacgctcaccggctccagatttatcagcaataaaccagccagccggaagggccgagcgcagaagtggtcctgcaactttatccgcctccatccagtctattaattgttgccgggaagctagagtaagtagttcgccagttaatagtttgcgcaacgttgttgccattgctacaggcatcgtggtgtcacgctcgtcgtttggtatggcttcattcagctccggttcccaacgatcaaggcgagttacatgatcccccatgttgtgcaaaaaagcggttagctccttcggtcctccgatcgttgtcagaagtaagttggccgcagtgttatcactcatggttatggcagcactgcataattctcttactgtcatgccatccgtaagatgcttttctgtgactggtgagtactcaaccaagtcattctgagaatagtgtatgcggcgaccgagttgctcttgcccggcgtcaatacgggataataccgcgccacatagcagaactttaaaagtgctcatcattggaaaacgttcttcggggcgaaaactctcaaggatcttaccgctgttgagatccagttcgatgtaacccactcgtgcacccaactgatcttcagcatcttttactttcaccagcgtttctgggtgagcaaaaacaggaaggcaaaatgccgcaaaaaagggaataagggcgacacggaaatgttgaatactcatactcttcctttttcaatattattgaagcatttatcagggttattgtctcatgagcggatacatatttgaatgtatttagaaaaataaacaaataggggttccgcgcacatttccccgaaaagtgccacctgacgtcgacggatcgggagatctcccgatcccctatggtgcactctcagtacaatctgctctgatgccgcatagttaagccagtatctgctccctgcttgtgtgttggaggtcgctgagtagtgcgcgagcaaaatttaagctacaacaaggcaaggcttgaccgacaattgcatgaagaatctgcttagggttaggcgttttgcgctgcttcgcgatgtacgggccagatatacgcgttgacattgattattgactagttattaatagtaatcaattacggggtcattagttcatagcccatatatggagttccgcgttacataacttacggtaaatggcccgcctggctgaccgcccaacgacccccgcccattgacgtcaataatgacgtatgttcccatagtaacgccaatagggactttccattgacgtcaatgggtggagtatttacggtaaactgcccacttggcagtacatcaagtgtatcatatgccaagtacgccccctattgacgtcaatgacggtaaatggcccgcctggcattatgcccagtacatgaccttatgggactttcctacttggcagtacatctacgtattagtcatcgctattaccatggtgatgcggttttggcagtacatcaatgggcgtggatagcggtttgactcacggggatttccaagtctccaccccattgacgtcaatgggagtttgttttggcaccaaaatcaacgggactttccaaaatgtcgtaacaactccgccccattgacgcaaatgggcggtaggcgtgtacggtgggaggtctatataagcagcgcgttttgcct

SEQ ID NO: 91 - DNA, 12024 bp, synthetic construct
  misc_feature 1..12024: note = Synthetic: FG12-CD11b-Kozak-IgKVIII-RMP5-miR362-A-Fc-Dss6
  source 1..12024: mol_type = other DNA
gtactgggtctctctggttagaccagatctgagcctgggagctctctggctaactagggaacccactgcttaagcctcaataaagcttgccttgagtgcttcaagtagtgtgtgcccgtctgttgtgtgactctggtaactagagatccctcagacccttttagtcagtgtggaaaatctctagcagtggcgcccgaacagggacttgaaagcgaaagggaaaccagaggagctctctcgacgcaggactcggcttgctgaagcgcgcacggcaagaggcgaggggcggcgactggtgagtacgccaaaaattttgactagcggaggctagaaggagagagatgggtgcgagagcgtcagtattaagcgggggagaattagatcgcgatgggaaaaaattcggttaaggccagggggaaagaaaaaatataaattaaaacatatagtatgggcaagcagggagctagaacgattcgcagttaatcctggcctgttagaaacatcagaaggctgtagacaaatactgggacagctacaaccatcccttcagacaggatcagaagaacttagatcattatataatacagtagcaaccctctattgtgtgcatcaaaggatagagataaaagacaccaaggaagctttagacaagatagaggaagagcaaaacaaaagtaagaccaccgcacagcaagcggccgctgatcttcagacctggaggaggagatatgagggacaattggagaagtgaattatataaatataaagtagtaaaaattgaaccattaggagtagcacccaccaaggcaaagagaagagtggtgcagagagaaaaaagagcagtgggaataggagctttgttccttgggttcttgggagcagcaggaagcactatgggcgcagcgtcaatgacgctgacggtacaggccagacaattattgtctggtatagtgcagcagcagaacaatttgctgagggctattgaggcgcaacagcatctgttgcaactcacagtctggggcatcaagcagctccaggcaagaatcctggctgtggaaagatacctaaaggatcaacagctcctggggatttggggttgctctggaaaactcatttgcaccactgctgtgccttggaatgctagttggagtaataaatctctggaacagatttggaatcacacgacctggatggagtgggacagagaaattaacaattacacaagcttaatacactccttaattgaagaatcgcaaaaccagcaagaaaagaatgaacaagaattattggaattagataaatgggcaagtttgtggaattggtttaacataacaaattggctgtggtatataaaattattcataatgatagtaggaggcttggtaggtttaagaatagtttttgctgtactttctatagtgaatagagttaggcagggatattcaccattatcgtttcagacccacctcccaaccccgaggggacccgacaggcccgaaggaatagaagaagaaggtggagagagagacagagacagatccattcgattagtgaacggatcggcactgcgtgcgccaattctgcagacaaatggcagtattcatccacaattttaaaagaaaaggggggattggggggtacagtgcaggggaaagaatagtagacataatagcaacagacatacaaactaaagaattacaaaaacaaattacaaaaattcaaaattttcgggtttattacagggacagcagagatccagtttggttaattaatgcaaatatatatatatatatatatttttttttttttttagagataagagtcttgctctgtcgcctaggctggagtgcagtggcacaatctctgctcactgcaacctccgcctccagggttcaagtgattctgctgcctcagcctcccaggtgggattacaggtgcctgccaccacgcctggctaatttttttgtctttttagtaaagatgaggtttcaccatgttgggcaggctggtttcaattgctgacctcaagtgagccaccccgcctcagcctcccaaaatgctaggattacaggcatgagccaccgcacccagccaagtttgtacatatatttttgactacacttcttaactattcttaggataaattactagaagtgaaaattcttgggtgaagagcttgaggcctttacacacacacacacacacacacacacacacacacaaataggctggatgcagtggctcacacctgtaatctcagcagtttgggaggctgaggaaggaggatcacttgagtccaggaggttgagaatagcctgaacaacatagcaagatcttgtctctacaaaaaatttaaaaaaaattagctggccatggcagcatgtgcctgtagtaccagctactcggaaggctgaggtaggaggatcgcttgagcccaggaggttgattgaagctgcagtgagctgtgattacaccactgcactccagcctgggcaacagagctagactctgtctctaaaaaaagcacaaaataatatttaaaaagcaccaggtatgcctgtacttgagttgtctttgttgatggctacaaatgaggacagctctggctgaagggcgcttccatttccatgggctgaaggagggacattttgcaaagtgtgttttcaggaagacacagagttttacctcctacacttgtttgatctgtattaatgtttgcttatttatttatttaattttttttttgagacagagtctcactctgtcacctgggctggagtgcagtggcattattgaggctcattgcagtctcagactcctgagctcaaacaatcctcctgcctcagcctctggagtagctaggactacaggcatgtgccaccatgcctggctaattttttaaatgtatttttttgtagagtcggggtctccctatgttgcccaggctggagtgcagtggtgtgatcctagctcactgcagcctggacctcgggctcaagtaattctcacacctcagcctgtccagtagcaggggctacaggcgcgcaccaccatgcccagctaattaaaaatatttttttgtagagacagggtctctctatgttgcccaggctggtttcaaactcccaggctcaagcaatcctcctgccttggcctcccaaagtgctggcattacaggcgtgagccactgcgcctggcccgtattaatgtttagaacacgaattccaggaggcaggctaagtctattcagcttgttcatatgcttgggccaacccaagaaacaagtgggtgacaaatggcaccttttggatagtggtattgactttgaaagtttgggtcaggaagctggggaggaagggtgggcaggctgtgggcagtcctgggcggaagaccaggcagggctatgtgctcactgagcctccgccctcttcctttgaatctctgatagacttctgcctcctacttctccttttctgcccttctttgctttggtggcttccttgtggttcctcagtggtgcctgcaacccctggttcacctccttccaggttctggctccttccagccttcgaagctagcgccaccatggatatgcgcgtacccgctcaacttctgggtttgttgctgctttggctcaggggagcccgctgtgccgcgcttgtccctgaaaaggagaaggaccccaaatattggagagaccaggctcaggaaaccctcaagtacgctcttgaactgcaaaagcttaatactaacgtggctaaaaacgtgataatgttcttgggggacggaatgggggtttcaaccgttaccgcggccagaatcttgaaagggcagctgcaccataacccaggcgaagaaacgaggctggagatggacaaatttccattcgtggcgctttctaagacctacaacactaacgcccaggtccctgactcagctggtacggccactgcctacctttgtggagtgaaggcaaatgaggggactgttggtgtttccgcagctactgagagatctcggtgtaatacgactcaaggtaatgaagttacatccatactccgatgggcaaaagacgcgggcaaatctgttgggattgttacaactactagggtgaaccatgcgacaccctctgcagcttatgcgcacagtgccgaccgagactggtattcagataatgagatgccacccgaggcccttagccagggctgcaaggacatagcctatcaattgatgcacaatatcagagacatagacgttataatgggtggtggtcgcaagtacatgtaccccaaaaacaaaaccgacgtagagtatgaatccgatgaaaaagctaggggcaccagactcgacggacttgatctggttgatacatggaagagcttcaagcccagatacaagcattcacatttcatctggaacaggaccgaacttctcacattggacccccacaatgttgactatctcctcggtttgtttgaaccaggggatatgcagtatgagctcaatcggaacaacgtcactgaccccagtttgagtgaaatggtcgttgttgcaatacaaattttgaggaaaaatccaaaggggtttttcttgttggtagagggcggacggatagatcacgggcaccacgaaggcaaagcaaaacaggccctgcacgaagccgttgaaatggatcgcgctatcggtcaagccggctccctgacgagtagtgaagataccttgaccgtcgtcactgcggatcatagccacgtttttacctttgggggatacacccccaggggcaactcaatttttggacttgcaccgatgctcagcgacacagataaaaagccttttactgcgattctgtatggcaacggccctggatacaaagtagtagggggtgaaagggaaaacgtcagcatggtggactatgcacacaataattatcaggcgcagtccgctgttccgctgcggcatgagactcacgggggagaggacgttgctgtcttttccaagggaccaatggctcatcttctccatggagtccatgagcaaaattatgtccctcatgtcatggcatacgctgcatgtataggagcaaatctcgggcactgtgcaccggcgtcctccctcaaagacaaaacacacacttgtccaccttgcccggcacctgaacttctgggcggcccgagcgtttttttgttccctcctaaacctaaggacacgctcatgatcagccgcacgccagaggttacctgtgtagtggtggatgtcagccacgaggatccggaagtaaaattcaactggtatgtagatggggtggaggttcacaatgccaaaaccaagccacgagaggaacagtacaatagtacttaccgggtcgtgtctgtattgaccgtcctgcatcaggattggttgaacgggaaagaatataagtgcaaggtgagcaacaaagcacttccggccccaatagagaaaacaattagtaaagcaaaaggacaaccacgggaaccgcaagtttatacactgccgccctctcgagacgagctgaccaaaaatcaggttagccttacatgtttggtcaaggggttctacccgagtgatattgcagtggaatgggaatccaacggtcaaccagaaaataactacaaaactactccgccggtgttggattcagacggctctttctttctgtatagcaaactcactgttgacaagtcaagatggcagcagggcaatgtatttagctgtagtgttatgcacgaagctcttcataaccactacacacaaaagtcactttctctttccccaggaaaagacatcgattccagcgacagttcagacagctctgacagctccgattcctccgactcaagttgagaattcgatatcaagcttatcgataatcaacctctggattacaaaatttgtgaaagattgactggtattcttaactatgttgctccttttacgctatgtggatacgctgctttaatgcctttgtatcatgctattgcttcccgtatggctttcattttctcctccttgtataaatcctggttgctgtctctttatgaggagttgtggcccgttgtcaggcaacgtggcgtggtgtgcactgtgtttgctgacgcaacccccactggttggggcattgccaccacctgtcagctcctttccgggactttcgctttccccctccctattgccacggcggaactcatcgccgcctgccttgcccgctgctggacaggggctcggctgttgggcactgacaattccgtggtgttgtcggggaaatcatcgtcctttccttggctgctcgcctgtgttgccacctggattctgcgcgggacgtccttctgctacgtcccttcggccctcaatccagcggaccttccttcccgcggcctgctgccggctctgcggcctcttccgcgtcttcgccttcgccctcagacgagtcggatctccctttgggccgcctccccgcatcgataccgtcgacctcgagacctagaaaaacatggagcaatcacaagtagcaatacagcagctaccaatgctgattgtgcctggctagaagcacaagaggaggaggaggtgggttttccagtcacacctcaggtacctttaagaccaatgacttacaaggcagctgtagatcttagccactttttaaaagaaaaggggggactggaagggctaattcactcccaacgaagacaagatatccttgatctgtggatctaccacacacaaggctacttccctgattggcagaactacacaccagggccagggatcagatatccactgacctttggatggtgctacaagctagtaccagttgagcaagagaaggtagaagaagccaatgaaggagagaacacccgcttgttacaccctgtgagcctgcatgggatggatgacccggagagagaagtattagagtggaggtttgacagccgcctagcatttcatcacatggcccgagagctgcatccggactgtactgggtctctctggttagaccagatctgagcctgggagctctctggctaactagggaacccactgcttaagcctcaataaagcttgccttgagtgcttcaagtagtgtgtgcccgtctgttgtgtgactctggtaactagagatccctcagacccttttagtcagtgtggaaaatctctagcagggcccgtttaaacccgctgatcagcctcgactgtgccttctagttgccagccatctgttgtttgcccctcccccgtgccttccttgaccctggaaggtgccactcccactgtcctttcctaataaaatgaggaaattgcatcgcattgtctgagtaggtgtcattctattctggggggtggggtggggcaggacagcaagggggaggattgggaagacaatagcaggcatgctggggatgcggtgggctctatggcttctgaggcggaaagaaccagctggggctctagggggtatccccacgcgccctgtagcggcgcattaagcgcggcgggtgtggtggttacgcgcagcgtgaccgctacacttgccagcgccctagcgcccgctcctttcgctttcttcccttcctttctcgccacgttcgccggctttccccgtcaagctctaaatcgggggctccctttagggttccgatttagtgctttacggcacctcgaccccaaaaaacttgattagggtgatggttcacgtagtgggccatcgccctgatagacggtttttcgccctttgacgttggagtccacgttctttaatagtggactcttgttccaaactggaacaacactcaaccctatctcggtctattcttttgatttataagggattttgccgatttcggcctattggttaaaaaatgagctgatttaacaaaaatttaacgcgaattaattctgtggaatgtgtgtcagttagggtgtggaaagtccccaggctccccagcaggcagaagtatgcaaagcatgcatctcaattagtcagcaaccaggtgtggaaagtccccaggctccccagcaggcagaagtatgcaaagcatgcatctcaattagtcagcaaccatagtcccgcccctaactccgcccatcccgcccctaactccgcccagttccgcccattctccgccccatggctgactaattttttttatttatgcagaggccgaggccgcctctgcctctgagctattccagaagtagtgaggaggcttttttggaggcctaggcttttgcaaaaagctcccgggagcttgtatatccattttcggatctgatcagcacgtgttgacaattaatcatcggcatagtatatcggcatagtataatacgacaaggtgaggaactaaaccatggccaagttgaccagtgccgttccggtgctcaccgcgcgcgacgtcgccggagcggtcgagttctggaccgaccggctcgggttctcccgggacttcgtggaggacgacttcgccggtgtggtccgggacgacgtgaccctgttcatcagcgcggtccaggaccaggtggtgccggacaacaccctggcctgggtgtgggtgcgcggcctggacgagctgtacgccgagtggtcggaggtcgtgtccacgaacttccgggacgcctccgggccggccatgaccgagatcggcgagcagccgtgggggcgggagttcgccctgcgcgacccggccggcaactgcgtgcacttcgtggccgaggagcaggactgacacgtgctacgagatttcgattccaccgccgccttctatgaaaggttgggcttcggaatcgttttccgggacgccggctggatgatcctccagcgcggggatctcatgctggagttcttcgcccaccccaacttgtttattgcagcttataatggttacaaataaagcaatagcatcacaaatttcacaaataaagcatttttttcactgcattctagttgtggtttgtccaaactcatcaatgtatcttatcatgtctgtataccgtcgacctctagctagagcttggcgtaatcatggtcatagctgtttcctgtgtgaaattgttatccgctcacaattccacacaacatacgagccggaagcataaagtgtaaagcctggggtgcctaatgagtgagctaactcacattaattgcgttgcgctcactgcccgctttccagtcgggaaacctgtcgtgccagctgcattaatgaatcggccaacgcgcggggagaggcggtttgcgtattgggcgctcttccgcttcctcgctcactgactcgctgcgctcggtcgttcggctgcggcgagcggtatcagctcactcaaaggcggtaatacggttatccacagaatcaggggataacgcaggaaagaacatgtgagcaaaaggccagcaaaaggccaggaaccgtaaaaaggccgcgttgctggcgtttttccataggctccgcccccctgacgagcatcacaaaaatcgacgctcaagtcagaggtggcgaaacccgacaggactataaagataccaggcgtttccccctggaagctccctcgtgcgctctcctgttccgaccctgccgcttaccggatacctgtccgcctttctcccttcgggaagcgtggcgctttctcatagctcacgctgtaggtatctcagttcggtgtaggtcgttcgctccaagctgggctgtgtgcacgaaccccccgttcagcccgaccgctgcgccttatccggtaactatcgtcttgagtccaacccggtaagacacgacttatcgccactggcagcagccactggtaacaggattagcagagcgaggtatgtaggcggtgctacagagttcttgaagtggtggcctaactacggctacactagaagaacagtatttggtatctgcgctctgctgaagccagttaccttcggaaaaagagttggtagctcttgatccggcaaacaaaccaccgctggtagcggtggtttttttgtttgcaagcagcagattacgcgcagaaaaaaaggatctcaagaagatcctttgatcttttctacggggtctgacgctcagtggaacgaaaactcacgttaagggattttggtcatgagattatcaaaaaggatcttcacctagatccttttaaattaaaaatgaagttttaaatcaatctaaagtatatatgagtaaacttggtctgacagttaccaatgcttaatcagtgaggcacctatctcagcgatctgtctatttcgttcatccatagttgcctgactccccgtcgtgtagataactacgatacgggagggcttaccatctggccccagtgctgcaatgataccgcgagacccacgctcaccggctccagatttatcagcaataaaccagccagccggaagggccgagcgcagaagtggtcctgcaactttatccgcctccatccagtctattaattgttgccgggaagctagagtaagtagttcgccagttaatagtttgcgcaacgttgttgccattgctacaggcatcgtggtgtcacgctcgtcgtttggtatggcttcattcagctccggttcccaacgatcaaggcgagttacatgatcccccatgttgtgcaaaaaagcggttagctccttcggtcctccgatcgttgtcagaagtaagttggccgcagtgttatcactcatggttatggcagcactgcataattctcttactgtcatgccatccgtaagatgcttttctgtgactggtgagtactcaaccaagtcattctgagaatagtgtatgcggcgaccgagttgctcttgcccggcgtcaatacgggataataccgcgccacatagcagaactttaaaagtgctcatcattggaaaacgttcttcggggcgaaaactctcaaggatcttaccgctgttgagatccagttcgatgtaacccactcgtgcacccaactgatcttcagcatcttttactttcaccagcgtttctgggtgagcaaaaacaggaaggcaaaatgccgcaaaaaagggaataagggcgacacggaaatgttgaatactcatactcttcctttttcaatattattgaagcatttatcagggttattgtctcatgagcggatacatatttgaatgtatttagaaaaataaacaaataggggttccgcgcacatttccccgaaaagtgccacctgacgtcgacggatcgggagatctcccgatcccctatggtgcactctcagtacaatctgctctgatgccgcatagttaagccagtatctgctccctgcttgtgtgttggaggtcgctgagtagtgcgcgagcaaaatttaagctacaacaaggcaaggcttgaccgacaattgcatgaagaatctgcttagggttaggcgttttgcgctgcttcgcgatgtacgggccagatatacgcgttgacattgattattgactagttattaatagtaatcaattacggggtcattagttcatagcccatatatggagttccgcgttacataacttacggtaaatggcccgcctggctgaccgcccaacgacccccgcccattgacgtcaataatgacgtatgttcccatagtaacgccaatagggactttccattgacgtcaatgggtggagtatttacggtaaactgcccacttggcagtacatcaagtgtatcatatgccaagtacgccccctattgacgtcaatgacggtaaatggcccgcctggcattatgcccagtacatgaccttatgggactttcctacttggcagtacatctacgtattagtcatcgctattaccatggtgatgcggttttggcagtacatcaatgggcgtggatagcggtttgactcacggggatttccaagtctccaccccattgacgtcaatgggagtttgttttggcaccaaaatcaacgggactttccaaaatgtcgtaacaactccgccccattgacgcaaatgggcggtaggcgtgtacggtgggaggtctatataagcagcgcgttttgcct

SEQ ID NO: 92 - DNA, 10994 bp, synthetic construct
  misc_feature 1..10994: note = Synthetic: FG12W-m3SD400-MND-kozak-IgKVIII-RMP5-miR362A-Fc-DSS6
  source 1..10994: mol_type = other DNA
gtactgggtctctctggttagaccagatctgagcctgggagctctctggctaactagggaacccactgcttaagcctcaataaagcttgccttgagtgcttcaagtagtgtgtgcccgtctgttgtgtgactctggtaactagagatccctcagacccttttagtcagtgtggaaaatctctagcagtggcgcccgaacagggacttgaaagcgaaagggaaaccagaggagctctctcgacgcaggactcggcttgctgaagcgcgcacggcaagaggcgaggggcggcgactggtgagtacgccaaaaattttgactagcggaggctagaaggagagagatgggtgcgagagcgtcagtattaagcgggggagaattagatcgcgatgggaaaaaattcggttaaggccagggggaaagaaaaaatataaattaaaacatatagtatgggcaagcagggagctagaacgattcgcagttaatcctggcctgttagaaacatcagaaggctgtagacaaatactgggacagctacaaccatcccttcagacaggatcagaagaacttagatcattatataatacagtagcaaccctctattgtgtgcatcaaaggatagagataaaagacaccaaggaagctttagacaagatagaggaagagcaaaacaaaagtaagaccaccgcacagcaagcggccgctgatcttcagacctggaggaggagatatgagggacaattggagaagtgaattatataaatataaagtagtaaaaattgaaccattaggagtagcacccaccaaggcaaagagaagagtggtgcagagagaaaaaagagcagtgggaataggagctttgttccttgggttcttgggagcagcaggaagcactatgggcgcagcgtcaatgacgctgacggtacaggccagacaattattgtctggtatagtgcagcagcagaacaatttgctgagggctattgaggcgcaacagcatctgttgcaactcacagtctggggcatcaagcagctccaggcaagaatcctggctgtggaaagatacctaaaggatcaacagctcctggggatttggggttgctctggaaaactcatttgcaccactgctgtgccttggaatgctagttggagtaataaatctctggaacagatttggaatcacacgacctggatggagtgggacagagaaattaacaattacacaagcttaatacactccttaattgaagaatcgcaaaaccagcaagaaaagaatgaacaagaattattggaattagataaatgggcaagtttgtggaattggtttaacataacaaattggctgtggtatataaaattattcataatgatagtaggaggcttggtaggtttaagaatagtttttgctgtactttctatagtgaatagagttaggcagggatattcaccattatcgtttcagacccacctcccaaccccgaggggacccgacaggcccgaaggaatagaagaagaaggtggagagagagacagagacagatccattcgattagtgaacggatcggcactgcgtgcgccaattctgcagacaaatggcagtattcatccacaattttaaaagaaaaggggggattggggggtacagtgcaggggaaagaatagtagacataatagcaacagacatacaaactaaagaattacaaaaacaaattacaaaaattcaaaattttcgggtttattacagggacagcagagatccagtttggttaattaagaacagagagacagcagaatatgggccaaacaggatatctgtggtaagcagttcctgccccggctcagggccaagaacagttggaacagcagaatatgggccaaacaggatatctgtggtaagcagttcctgccccggctcagggccaagaacagatggtccccagatgcggtcccgccctcagcagtttctagagaaccatcagatgtttccagggtgccccaaggacctgaaatgaccctgtgccttatttgaactaaccaatcagttcgcttctcgcttctgttcgcgcgcttctgctccccgagctctatataagcagagctcgtttagtgaaccgtcagatccgtacgttcgaagctagcgccaccatggatatgcgcgtacccgctcaacttctgggtttgttgctgctttggctcaggggagcccgctgtgccgcgcttgtccctgaaaaggagaaggaccccaaatattggagagaccaggctcaggaaaccctcaagtacgctcttgaactgcaaaagcttaatactaacgtggctaaaaacgtgataatgttcttgggggacggaatgggggtttcaaccgttaccgcggccagaatcttgaaagggcagctgcaccataacccaggcgaagaaacgaggctggagatggacaaatttccattcgtggcgctttctaagacctacaacactaacgcccaggtccctgactcagctggtacggccactgcctacctttgtggagtgaaggcaaatgaggggactgttggtgtttccgcagctactgagagatctcggtgtaatacgactcaaggtaatgaagttacatccatactccgatgggcaaaagacgcgggcaaatctgttgggattgttacaactactagggtgaaccatgcgacaccctctgcagcttatgcgcacagtgccgaccgagactggtattcagataatgagatgccacccgaggcccttagccagggctgcaaggacatagcctatcaattgatgcacaatatcagagacatagacgttataatgggtggtggtcgcaagtacatgtaccccaaaaacaaaaccgacgtagagtatgaatccgatgaaaaagctaggggcaccagactcgacggacttgatctggttgatacatggaagagcttcaagcccagatacaagcattcacatttcatctggaacaggaccgaacttctcacattggacccccacaatgttgactatctcctcggtttgtttgaaccaggggatatgcagtatgagctcaatcggaacaacgtcactgaccccagtttgagtgaaatggtcgttgttgcaatacaaattttgaggaaaaatccaaaggggtttttcttgttggtagagggcggacggatagatcacgggcaccacgaaggcaaagcaaaacaggccctgcacgaagccgttgaaatggatcgcgctatcggtcaagccggctccctgacgagtagtgaagataccttgaccgtcgtcactgcggatcatagccacgtttttacctttgggggatacacccccaggggcaactcaatttttggacttgcaccgatgctcagcgacacagataaaaagccttttactgcgattctgtatggcaacggccctggatacaaagtagtagggggtgaaagggaaaacgtcagcatggtggactatgcacacaataattatcaggcgcagtccgctgttccgctgcggcatgagactcacgggggagaggacgttgctgtcttttccaagggaccaatggctcatcttctccatggagtccatgagcaaaattatgtccctcatgtcatggcatacgctgcatgtataggagcaaatctcgggcactgtgcaccggcgtcctccctcaaagacaaaacacacacttgtccaccttgcccggcacctgaacttctgggcggcccgagcgtttttttgttccctcctaaacctaaggacacgctcatgatcagccgcacgccagaggttacctgtgtagtggtggatgtcagccacgaggatccggaagtaaaattcaactggtatgtagatggggtggaggttcacaatgccaaaaccaagccacgagaggaacagtacaatagtacttaccgggtcgtgtctgtattgaccgtcctgcatcaggattggttgaacgggaaagaatataagtgcaaggtgagcaacaaagcacttccggccccaatagagaaaacaattagtaaagcaaaaggacaaccacgggaaccgcaagtttatacactgccgccctctcgagacgagctgaccaaaaatcaggttagccttacatgtttggtcaaggggttctacccgagtgatattgcagtggaatgggaatccaacggtcaaccagaaaataactacaaaactactccgccggtgttggattcagacggctctttctttctgtatagcaaactcactgttgacaagtcaagatggcagcagggcaatgtatttagctgtagtgttatgcacgaagctcttcataaccactacacacaaaagtcactttctctttccccaggaaaagacatcgattccagcgacagttcagacagctctgacagctccgattcctccgactcaagttgagaattcgatatcaagcttatcgataatcaacctctggattacaaaatttgtgaaagattgactggtattcttaactatgttgctccttttacgctatgtggatacgctgctttaatgcctttgtatcatgctattgcttcccgtatggctttcattttctcctccttgtataaatcctggttgctgtctctttatgaggagttgtggcccgttgtcaggcaacgtggcgtggtgtgcactgtgtttgctgacgcaacccccactggttggggcattgccaccacctgtcagctcctttccgggactttcgctttccccctccctattgccacggcggaactcatcgccgcctgccttgcccgctgctggacaggggctcggctgttgggcactgacaattccgtggtgttgtcggggaaatcatcgtcctttccttggctgctcgcctgtgttgccacctggattctgcgcgggacgtccttctgctacgtcccttcggccctcaatccagcggaccttccttcccgcggcctgctgccggctctgcggcctcttccgcgtcttcgccttcgccctcagacgagtcggatctccctttgggccgcctccccgcatcgataccgtcgacctcgagacctagaaaaacatggagcaatcacaagtagcaatacagcagctaccaatgctgattgtgcctggctagaagcacaagaggaggaggaggtgggttttccagtcacacctcaggtacctttaagaccaatgacttacaaggcagctgtagatcttagccactttttaaaagaaaaggggggactggaagggctaattcactcccaacgaagacaagatatccttgatctgtggatctaccacacacaaggctacttccctgattggcagaactacacaccagggccagggatcagatatccactgacctttggatggtgctacaagctagtaccagttgagcaagagaaggtagaagaagccaatgaaggagagaacacccgcttgttacaccctgtgagcctgcatgggatggatgacccggagagagaagtattagagtggaggtttgacagccgcctagcatttcatcacatggcccgagagctgcatccggaatccctgcaggcattcaaggccaggctggatgtggctctgggcagcctgggctgctggttgatgaccctgcacatagcagggggttggatctggatgagcactgtgctcctttgcaacccaggccgttctatgattctgtcattctaaatctctctttcagcctaaagctttttccccgtatccccccaagtgtctgcaggctcaaagagcagcgagaagcgttcagaggaaagcgatcccgtgccaccttccccgtgcccgggctgtccccgcacgctgccggctcggggatgcggggggagcgccggaccggagcggagccccgggcggctcgctgctgccccctagcgggggagggacgtaattacatccctgggggctttgggggggggctgtccccgtgagctccccctgtactgggtctctctggttagaccagatctgagcctgggagctctctggctaactagggaacccactgcttaagcctcaataaagcttgccttgagtgcttcaagtagtgtgtgcccgtctgttgtgtgactctggtaactagagatccctcagacccttttagtcagtgtggaaaatctctagcagggcccgtttaaacccgctgatcagcctcgactgtgccttctagttgccagccatctgttgtttgcccctcccccgtgccttccttgaccctggaaggtgccactcccactgtcctttcctaataaaatgaggaaattgcatcgcattgtctgagtaggtgtcattctattctggggggtggggtggggcaggacagcaagggggaggattgggaagacaatagcaggcatgctggggatgcggtgggctctatggcttctgaggcggaaagaaccagctggggctctagggggtatccccacgcgccctgtagcggcgcattaagcgcggcgggtgtggtggttacgcgcagcgtgaccgctacacttgccagcgccctagcgcccgctcctttcgctttcttcccttcctttctcgccacgttcgccggctttccccgtcaagctctaaatcgggggctccctttagggttccgatttagtgctttacggcacctcgaccccaaaaaacttgattagggtgatggttcacgtagtgggccatcgccctgatagacggtttttcgccctttgacgttggagtccacgttctttaatagtggactcttgttccaaactggaacaacactcaaccctatctcggtctattcttttgatttataagggattttgccgatttcggcctattggttaaaaaatgagctgatttaacaaaaatttaacgcgaattaattctgtggaatgtgtgtcagttagggtgtggaaagtccccaggctccccagcaggcagaagtatgcaaagcatgcatctcaattagtcagcaaccaggtgtggaaagtccccaggctccccagcaggcagaagtatgcaaagcatgcatctcaattagtcagcaaccatagtcccgcccctaactccgcccatcccgcccctaactccgcccagttccgcccattctccgccccatggctgactaattttttttatttatgcagaggccgaggccgcctctgcctctgagctattccagaagtagtgaggaggcttttttggaggcctaggcttttgcaaaaagctcccgggagcttgtatatccattttcggatctgatcagcacgtgttgacaattaatcatcggcatagtatatcggcatagtataatacgacaaggtgaggaactaaaccatggccaagttgaccagtgccgttccggtgctcaccgcgcgcgacgtcgccggagcggtcgagttctggaccgaccggctcgggttctcccgggacttcgtggaggacgacttcgccggtgtggtccgggacgacgtgaccctgttcatcagcgcggtccaggaccaggtggtgccggacaacaccctggcctgggtgtgggtgcgcggcctggacgagctgtacgccgagtggtcggaggtcgtgtccacgaacttccgggacgcctccgggccggccatgaccgagatcggcgagcagccgtgggggcgggagttcgccctgcgcgacccggccggcaactgcgtgcacttcgtggccgaggagcaggactgacacgtgctacgagatttcgattccaccgccgccttctatgaaaggttgggcttcggaatcgttttccgggacgccggctggatgatcctccagcgcggggatctcatgctggagttcttcgcccaccccaacttgtttattgcagcttataatggttacaaataaagcaatagcatcacaaatttcacaaataaagcatttttttcactgcattctagttgtggtttgtccaaactcatcaatgtatcttatcatgtctgtataccgtcgacctctagctagagcttggcgtaatcatggtcatagctgtttcctgtgtgaaattgttatccgctcacaattccacacaacatacgagccggaagcataaagtgtaaagcctggggtgcctaatgagtgagctaactcacattaattgcgttgcgctcactgcccgctttccagtcgggaaacctgtcgtgccagctgcattaatgaatcggccaacgcgcggggagaggcggtttgcgtattgggcgctcttccgcttcctcgctcactgactcgctgcgctcggtcgttcggctgcggcgagcggtatcagctcactcaaaggcggtaatacggttatccacagaatcaggggataacgcaggaaagaacatgtgagcaaaaggccagcaaaaggccaggaaccgtaaaaaggccgcgttgctggcgtttttccataggctccgcccccctgacgagcatcacaaaaatcgacgctcaagtcagaggtggcgaaacccgacaggactataaagataccaggcgtttccccctggaagctccctcgtgcgctctcctgttccgaccctgccgcttaccggatacctgtccgcctttctcccttcgggaagcgtggcgctttctcatagctcacgctgtaggtatctcagttcggtgtaggtcgttcgctccaagctgggctgtgtgcacgaaccccccgttcagcccgaccgctgcgccttatccggtaactatcgtcttgagtccaacccggtaagacacgacttatcgccactggcagcagccactggtaacaggattagcagagcgaggtatgtaggcggtgctacagagttcttgaagtggtggcctaactacggctacactagaagaacagtatttggtatctgcgctctgctgaagccagttaccttcggaaaaagagttggtagctcttgatccggcaaacaaaccaccgctggtagcggtggtttttttgtttgcaagcagcagattacgcgcagaaaaaaaggatctcaagaagatcctttgatcttttctacggggtctgacgctcagtggaacgaaaactcacgttaagggattttggtcatgagattatcaaaaaggatcttcacctagatccttttaaattaaaaatgaagttttaaatcaatctaaagtatatatgagtaaacttggtctgacagttaccaatgcttaatcagtgaggcacctatctcagcgatctgtctatttcgttcatccatagttgcctgactccccgtcgtgtagataactacgatacgggagggcttaccatctggccccagtgctgcaatgataccgcgagacccacgctcaccggctccagatttatcagcaataaaccagccagccggaagggccgagcgcagaagtggtcctgcaactttatccgcctccatccagtctattaattgttgccgggaagctagagtaagtagttcgccagttaatagtttgcgcaacgttgttgccattgctacaggcatcgtggtgtcacgctcgtcgtttggtatggcttcattcagctccggttcccaacgatcaaggcgagttacatgatcccccatgttgtgcaaaaaagcggttagctccttcggtcctccgatcgttgtcagaagtaagttggccgcagtgttatcactcatggttatggcagcactgcataattctcttactgtcatgccatccgtaagatgcttttctgtgactggtgagtactcaaccaagtcattctgagaatagtgtatgcggcgaccgagttgctcttgcccggcgtcaatacgggataataccgcgccacatagcagaactttaaaagtgctcatcattggaaaacgttcttcggggcgaaaactctcaaggatcttaccgctgttgagatccagttcgatgtaacccactcgtgcacccaactgatcttcagcatcttttactttcaccagcgtttctgggtgagcaaaaacaggaaggcaaaatgccgcaaaaaagggaataagggcgacacggaaatgttgaatactcatactcttcctttttcaatattattgaagcatttatcagggttattgtctcatgagcggatacatatttgaatgtatttagaaaaataaacaaataggggttccgcgcacatttccccgaaaagtgccacctgacgtcgacggatcgggagatctcccgatcccctatggtgcactctcagtacaatctgctctgatgccgcatagttaagccagtatctgctccctgcttgtgtgttggaggtcgctgagtagtgcgcgagcaaaatttaagctacaacaaggcaaggcttgaccgacaattgcatgaagaatctgcttagggttaggcgttttgcgctgcttcgcgatgtacgggccagatatacgcgttgacattgattattgactagttattaatagtaatcaattacggggtcattagttcatagcccatatatggagttccgcgttacataacttacggtaaatggcccgcctggctgaccgcccaacgacccccgcccattgacgtcaataatgacgtatgttcccatagtaacgccaatagggactttccattgacgtcaatgggtggagtatttacggtaaactgcccacttggcagtacatcaagtgtatcatatgccaagtacgccccctattgacgtcaatgacggtaaatggcccgcctggcattatgcccagtacatgaccttatgggactttcctacttggcagtacatctacgtattagtcatcgctattaccatggtgatgcggttttggcagtacatcaatgggcgtggatagcggtttgactcacggggatttccaagtctccaccccattgacgtcaatgggagtttgttttggcaccaaaatcaacgggactttccaaaatgtcgtaacaactccgccccattgacgcaaatgggcggtaggcgtgtacggtgggaggtctatataagcagcgcgttttgcct

SEQ ID NO: 93 - DNA, 10994 bp, synthetic construct
  misc_feature 1..10994: note = Synthetic: FG12W-m6SD400-MND-kozak-IgKVIII-RMP5-miR362A-Fc-DSS6
  source 1..10994: mol_type = other DNA
gtactgggtctctctggttagaccagatctgagcctgggagctctctggctaactagggaacccactgcttaagcctcaataaagcttgccttgagtgcttcaagtagtgtgtgcccgtctgttgtgtgactctggtaactagagatccctcagacccttttagtcagtgtggaaaatctctagcagtggcgcccgaacagggacttgaaagcgaaagggaaaccagaggagctctctcgacgcaggactcggcttgctgaagcgcgcacggcaagaggcgaggggcggcgactggtgagtacgccaaaaattttgactagcggaggctagaaggagagagatgggtgcgagagcgtcagtattaagcgggggagaattagatcgcgatgggaaaaaattcggttaaggccagggggaaagaaaaaatataaattaaaacatatagtatgggcaagcagggagctagaacgattcgcagttaatcctggcctgttagaaacatcagaaggctgtagacaaatactgggacagctacaaccatcccttcagacaggatcagaagaacttagatcattatataatacagtagcaaccctctattgtgtgcatcaaaggatagagataaaagacaccaaggaagctttagacaagatagaggaagagcaaaacaaaagtaagaccaccgcacagcaagcggccgctgatcttcagacctggaggaggagatatgagggacaattggagaagtgaattatataaatataaagtagtaaaaattgaaccattaggagtagcacccaccaaggcaaagagaagagtggtgcagagagaaaaaagagcagtgggaataggagctttgttccttgggttcttgggagcagcaggaagcactatgggcgcagcgtcaatgacgctgacggtacaggccagacaattattgtctggtatagtgcagcagcagaacaatttgctgagggctattgaggcgcaacagcatctgttgcaactcacagtctggggcatcaagcagctccaggcaagaatcctggctgtggaaagatacctaaaggatcaacagctcctggggatttggggttgctctggaaaactcatttgcaccactgctgtgccttggaatgctagttggagtaataaatctctggaacagatttggaatcacacgacctggatggagtgggacagagaaattaacaattacacaagcttaatacactccttaattgaagaatcgcaaaaccagcaagaaaagaatgaacaagaattattggaattagataaatgggcaagtttgtggaattggtttaacataacaaattggctgtggtatataaaattattcataatgatagtaggaggcttggtaggtttaagaatagtttttgctgtactttctatagtgaatagagttaggcagggatattcaccattatcgtttcagacccacctcccaaccccgaggggacccgacaggcccgaaggaatagaagaagaaggtggagagagagacagagacagatccattcgattagtgaacggatcggcactgcgtgcgccaattctgcagacaaatggcagtattcatccacaattttaaaagaaaaggggggattggggggtacagtgcaggggaaagaatagtagacataatagcaacagacatacaaactaaagaattacaaaaacaaattacaaaaattcaaaattttcgggtttattacagggacagcagagatccagtttggttaattaagaacagagagacagcagaatatgggccaaacaggatatctgtggtaagcagttcctgccccggctcagggccaagaacagttggaacagcagaatatgggccaaacaggatatctgtggtaagcagttcctgccccggctcagggccaagaacagatggtccccagatgcggtcccgccctcagcagtttctagagaaccatcagatgtttccagggtgccccaaggacctgaaatgaccctgtgccttatttgaactaaccaatcagttcgcttctcgcttctgttcgcgcgcttctgctccccgagctctatataagcagagctcgtttagtgaaccgtcagatccgtacgttcgaagctagcgccaccatggatatgcgcgtacccgctcaacttctgggtttgttgctgctttggctcaggggagcccgctgtgccgcgcttgtccctgaaaaggagaaggaccccaaatattggagagaccaggctcaggaaaccctcaagtacgctcttgaactgcaaaagcttaatactaacgtggctaaaaacgtgataatgttcttgggggacggaatgggggtttcaaccgttaccgcggccagaatcttgaaagggcagctgcaccataacccaggcgaagaaacgaggctggagatggacaaatttccattcgtggcgctttctaagacctacaacactaacgcccaggtccctgactcagctggtacggccactgcctacctttgtggagtgaaggcaaatgaggggactgttggtgtttccgcagctactgagagatctcggtgtaatacgactcaaggtaatgaagttacatccatactccgatgggcaaaagacgcgggcaaatctgttgggattgttacaactactagggtgaaccatgcgacaccctctgcagcttatgcgcacagtgccgaccgagactggtattcagataatgagatgccacccgaggcccttagccagggctgcaaggacatagcctatcaattgatgcacaatatcagagacatagacgttataatgggtggtggtcgcaagtacatgtaccccaaaaacaaaaccgacgtagagtatgaatccgatgaaaaagctaggggcaccagactcgacggacttgatctggttgatacatggaagagcttcaagcccagatacaagcattcacatttcatctggaacaggaccgaacttctcacattggacccccacaatgttgactatctcctcggtttgtttgaaccaggggatatgcagtatgagctcaatcggaacaacgtcactgaccccagtttgagtgaaatggtcgttgttgcaatacaaattttgaggaaaaatccaaaggggtttttcttgttggtagagggcggacggatagatcacgggcaccacgaaggcaaagcaaaacaggccctgcacgaagccgttgaaatggatcgcgctatcggtcaagccggctccctgacgagtagtgaagataccttgaccgtcgtcactgcggatcatagccacgtttttacctttgggggatacacccccaggggcaactcaatttttggacttgcaccgatgctcagcgacacagataaaaagccttttactgcgattctgtatggcaacggccctggatacaaagtagtagggggtgaaagggaaaacgtcagcatggtggactatgcacacaataattatcaggcgcagtccgctgttccgctgcggcatgagactcacgggggagaggacgttgctgtcttttccaagggaccaatggctcatcttctccatggagtccatgagcaaaattatgtccctcatgtcatggcatacgctgcatgtataggagcaaatctcgggcactgtgcaccggcgtcctccctcaaagacaaaacacacacttgtccaccttgcccggcacctgaacttctgggcggcccgagcgtttttttgttccctcctaaacctaaggacacgctcatgatcagccgcacgccagaggttacctgtgtagtggtggatgtcagccacgaggatccggaagtaaaattcaactggtatgtagatggggtggaggttcacaatgccaaaaccaagccacgagaggaacagtacaatagtacttaccgggtcgtgtctgtattgaccgtcctgcatcaggattggttgaacgggaaagaatataagtgcaaggtgagcaacaaagcacttccggccccaatagagaaaacaattagtaaagcaaaaggacaaccacgggaaccgcaagtttatacactgccgccctctcgagacgagctgaccaaaaatcaggttagccttacatgtttggtcaaggggttctacccgagtgatattgcagtggaatgggaatccaacggtcaaccagaaaataactacaaaactactccgccggtgttggattcagacggctctttctttctgtatagcaaactcactgttgacaagtcaagatggcagcagggcaatgtatttagctgtagtgttatgcacgaagctcttcataaccactacacacaaaagtcactttctctttccccaggaaaagacatcgattccagcgacagttcagacagctctgacagctccgattcctccgactcaagttgagaattcgatatcaagcttatcgataatcaacctctggattacaaaatttgtgaaagattgactggtattcttaactatgttgctccttttacgctatgtggatacgctgctttaatgcctttgtatcatgctattgcttcccgtatggctttcattttctcctccttgtataaatcctggttgctgtctctttatgaggagttgtggcccgttgtcaggcaacgtggcgtggtgtgcactgtgtttgctgacgcaacccccactggttggggcattgccaccacctgtcagctcctttccgggactttcgctttccccctccctattgccacggcggaactcatcgccgcctgccttgcccgctgctggacaggggctcggctgttgggcactgacaattccgtggtgttgtcggggaaatcatcgtcctttccttggctgctcgcctgtgttgccacctggattctgcgcgggacgtccttctgctacgtcccttcggccctcaatccagcggaccttccttcccgcggcctgctgccggctctgcggcctcttccgcgtcttcgccttcgccctcagacgagtcggatctccctttgggccgcctccccgcatcgataccgtcgacctcgagacctagaaaaacatggagcaatcacaagtagcaatacagcagctaccaatgctgattgtgcctggctagaagcacaagaggaggaggaggtgggttttccagtcacacctcaggtacctttaagaccaatgacttacaaggcagctgtagatcttagccactttttaaaagaaaaggggggactggaagggctaattcactcccaacgaagacaagatatccttgatctgtggatctaccacacacaaggctacttccctgattggcagaactacacaccagggccagggatcagatatccactgacctttggatggtgctacaagctagtaccagttgagcaagagaaggtagaagaagccaatgaaggagagaacacccgcttgttacaccctgtgagcctgcatgggatggatgacccggagagagaagtattagagtggaggtttgacagccgcctagcatttcatcacatggcccgagagctgcatccggaatccctgcaggcattcaaggccaggctggatgtggctctgggcagcctgggctgctggttgatgaccctgcacatagcagggggttggatctggatgagcactgtgctcctttgcaacccaggccgttctatgattctgtcattctaaatctctctttcagcctaaagctttttccccgtatccccccgggtgtctgcaggctcaaagagcagcgagaagcgttcagaggaaagcgatcccgtgccaccttccccgtgcccgggctgtccccgcacgctgccggctcggggatgcggggggagcgccggaccggagcggagccccgggcggctcgctgctgccccctagcgggggagggacgtaattacatccctgggggctttgggggggggctgtccccgtgagctccccctgtactgggtctctctggttagaccagatctgagcctgggagctctctggctaactagggaacccactgcttaagcctcaataaagcttgccttgagtgcttcaagtagtgtgtgcccgtctgttgtgtgactctggtaactagagatccctcagacccttttagtcagtgtggaaaatctctagcagggcccgtttaaacccgctgatcagcctcgactgtgccttctagttgccagccatctgttgtttgcccctcccccgtgccttccttgaccctggaaggtgccactcccactgtcctttcctaataaaatgaggaaattgcatcgcattgtctgagtaggtgtcattctattctggggggtggggtggggcaggacagcaagggggaggattgggaagacaatagcaggcatgctggggatgcggtgggctctatggcttctgaggcggaaagaaccagctggggctctagggggtatccccacgcgccctgtagcggcgcattaagcgcggcgggtgtggtggttacgcgcagcgtgaccgctacacttgccagcgccctagcgcccgctcctttcgctttcttcccttcctttctcgccacgttcgccggctttccccgtcaagctctaaatcgggggctccctttagggttccgatttagtgctttacggcacctcgaccccaaaaaacttgattagggtgatggttcacgtagtgggccatcgccctgatagacggtttttcgccctttgacgttggagtccacgttctttaatagtggactcttgttccaaactggaacaacactcaaccctatctcggtctattcttttgatttataagggattttgccgatttcggcctattggttaaaaaatgagctgatttaacaaaaatttaacgcgaattaattctgtggaatgtgtgtcagttagggtgtggaaagtccccaggctccccagcaggcagaagtatgcaaagcatgcatctcaattagtcagcaaccaggtgtggaaagtccccaggctccccagcaggcagaagtatgcaaagcatgcatctcaattagtcagcaaccatagtcccgcccctaactccgcccatcccgcccctaactccgcccagttccgcccattctccgccccatggctgactaattttttttatttatgcagaggccgaggccgcctctgcctctgagctattccagaagtagtgaggaggcttttttggaggcctaggcttttgcaaaaagctcccgggagcttgtatatccattttcggatctgatcagcacgtgttgacaattaatcatcggcatagtatatcggcatagtataatacgacaaggtgaggaactaaaccatggccaagttgaccagtgccgttccggtgctcaccgcgcgcgacgtcgccggagcggtcgagttctggaccgaccggctcgggttctcccgggacttcgtggaggacgacttcgccggtgtggtccgggacgacgtgaccctgttcatcagcgcggtccaggaccaggtggtgccggacaacaccctggcctgggtgtgggtgcgcggcctggacgagctgtacgccgagtggtcggaggtcgtgtccacgaacttccgggacgcctccgggccggccatgaccgagatcggcgagcagccgtgggggcgggagttcgccctgcgcgacccggccggcaactgcgtgcacttcgtggccgaggagcaggactgacacgtgctacgagatttcgattccaccgccgccttctatgaaaggttgggcttcggaatcgttttccgggacgccggctggatgatcctccagcgcggggatctcatgctggagttcttcgcccaccccaacttgtttattgcagcttataatggttacaaataaagcaatagcatcacaaatttcacaaataaagcatttttttcactgcattctagttgtggtttgtccaaactcatcaatgtatcttatcatgtctgtataccgtcgacctctagctagagcttggcgtaatcatggtcatagctgtttcctgtgtgaaattgttatccgctcacaattccacacaacatacgagccggaagcataaagtgtaaagcctggggtgcctaatgagtgagctaactcacattaattgcgttgcgctcactgcccgctttccagtcgggaaacctgtcgtgccagctgcattaatgaatcggccaacgcgcggggagaggcggtttgcgtattgggcgctcttccgcttcctcgctcactgactcgctgcgctcggtcgttcggctgcggcgagcggtatcagctcactcaaaggcggtaatacggttatccacagaatcaggggataacgcaggaaagaacatgtgagcaaaaggccagcaaaaggccaggaaccgtaaaaaggccgcgttgctggcgtttttccataggctccgcccccctgacgagcatcacaaaaatcgacgctcaagtcagaggtggcgaaacccgacaggactataaagataccaggcgtttccccctggaagctccctcgtgcgctctcctgttccgaccctgccgcttaccggatacctgtccgcctttctcccttcgggaagcgtggcgctttctcatagctcacgctgtaggtatctcagttcggtgtaggtcgttcgctccaagctgggctgtgtgcacgaaccccccgttcagcccgaccgctgcgccttatccggtaactatcgtcttgagtccaacccggtaagacacgacttatcgccactggcagcagccactggtaacaggattagcagagcgaggtatgtaggcggtgctacagagttcttgaagtggtggcctaactacggctacactagaagaacagtatttggtatctgcgctctgctgaagccagttaccttcggaaaaagagttggtagctcttgatccggcaaacaaaccaccgctggtagcggtggtttttttgtttgcaagcagcagattacgcgcagaaaaaaaggatctcaagaagatcctttgatcttttctacggggtctgacgctcagtggaacgaaaactcacgttaagggattttggtcatgagattatcaaaaaggatcttcacctagatccttttaaattaaaaatgaagttttaaatcaatctaaagtatatatgagtaaacttggtctgacagttaccaatgcttaatcagtgaggcacctatctcagcgatctgtctatttcgttcatccatagttgcctgactccccgtcgtgtagataactacgatacgggagggcttaccatctggccccagtgctgcaatgataccgcgagacccacgctcaccggctccagatttatcagcaataaaccagccagccggaagggccgagcgcagaagtggtcctgcaactttatccgcctccatccagtctattaattgttgccgggaagctagagtaagtagttcgccagttaatagtttgcgcaacgttgttgccattgctacaggcatcgtggtgtcacgctcgtcgtttggtatggcttcattcagctccggttcccaacgatcaaggcgagttacatgatcccccatgttgtgcaaaaaagcggttagctccttcggtcctccgatcgttgtcagaagtaagttggccgcagtgttatcactcatggttatggcagcactgcataattctcttactgtcatgccatccgtaagatgcttttctgtgactggtgagtactcaaccaagtcattctgagaatagtgtatgcggcgaccgagttgctcttgcccggcgtcaatacgggataataccgcgccacatagcagaactttaaaagtgctcatcattggaaaacgttcttcggggcgaaaactctcaaggatcttaccgctgttgagatccagttcgatgtaacccactcgtgcacccaactgatcttcagcatcttttactttcaccagcgtttctgggtgagcaaaaacaggaaggcaaaatgccgcaaaaaagggaataagggcgacacggaaatgttgaatactcatactcttcctttttcaatattattgaagcatttatcagggttattgtctcatgagcggatacatatttgaatgtatttagaaaaataaacaaataggggttccgcgcacatttccccgaaaagtgccacctgacgtcgacggatcgggagatctcccgatcccctatggtgcactctcagtacaatctgctctgatgccgcatagttaagccagtatctgctccctgcttgtgtgttggaggtcgctgagtagtgcgcgagcaaaatttaagctacaacaaggcaaggcttgaccgacaattgcatgaagaatctgcttagggttaggcgttttgcgctgcttcgcgatgtacgggccagatatacgcgttgacattgattattgactagttattaatagtaatcaattacggggtcattagttcatagcccatatatggagttccgcgttacataacttacggtaaatggcccgcctggctgaccgcccaacgacccccgcccattgacgtcaataatgacgtatgttcccatagtaacgccaatagggactttccattgacgtcaatgggtggagtatttacggtaaactgcccacttggcagtacatcaagtgtatcatatgccaagtacgccccctattgacgtcaatgacggtaaatggcccgcctggcattatgcccagtacatgaccttatgggactttcctacttggcagtacatctacgtattagtcatcgctattaccatggtgatgcggttttggcagtacatcaatgggcgtggatagcggtttgactcacggggatttccaagtctccaccccattgacgtcaatgggagtttgttttggcaccaaaatcaacgggactttccaaaatgtcgtaacaactccgccccattgacgcaaatgggcggtaggcgtgtacggtgggaggtctatataagcagcgcgttttgcct

SEQ ID NO: 94 - DNA, 13337 bp, synthetic construct
  misc_feature 1..13337: note = Synthetic: FG12W-CD68Lp-kozak-IgKVIII-RMP5-miR362A-Fc-DSS6
  source 1..13337: mol_type = other DNA
gtactgggtctctctggttagaccagatctgagcctgggagctctctggctaactagggaacccactgcttaagcctcaataaagcttgccttgagtgcttcaagtagtgtgtgcccgtctgttgtgtgactctggtaactagagatccctcagacccttttagtcagtgtggaaaatctctagcagtggcgcccgaacagggacttgaaagcgaaagggaaaccagaggagctctctcgacgcaggactcggcttgctgaagcgcgcacggcaagaggcgaggggcggcgactggtgagtacgccaaaaattttgactagcggaggctagaaggagagagatgggtgcgagagcgtcagtattaagcgggggagaattagatcgcgatgggaaaaaattcggttaaggccagggggaaagaaaaaatataaattaaaacatatagtatgggcaagcagggagctagaacgattcgcagttaatcctggcctgttagaaacatcagaaggctgtagacaaatactgggacagctacaaccatcccttcagacaggatcagaagaacttagatcattatataatacagtagcaaccctctattgtgtgcatcaaaggatagagataaaagacaccaaggaagctttagacaagatagaggaagagcaaaacaaaagtaagaccaccgcacagcaagcggccgctgatcttcagacctggaggaggagatatgagggacaattggagaagtgaattatataaatataaagtagtaaaaattgaaccattaggagtagcacccaccaaggcaaagagaagagtggtgcagagagaaaaaagagcagtgggaataggagctttgttccttgggttcttgggagcagcaggaagcactatgggcgcagcgtcaatgacgctgacggtacaggccagacaattattgtctggtatagtgcagcagcagaacaatttgctgagggctattgaggcgcaacagcatctgttgcaactcacagtctggggcatcaagcagctccaggcaagaatcctggctgtggaaagatacctaaaggatcaacagctcctggggatttggggttgctctggaaaactcatttgcaccactgctgtgccttggaatgctagttggagtaataaatctctggaacagatttggaatcacacgacctggatggagtgggacagagaaattaacaattacacaagcttaatacactccttaattgaagaatcgcaaaaccagcaagaaaagaatgaacaagaattattggaattagataaatgggcaagtttgtggaattggtttaacataacaaattggctgtggtatataaaattattcataatgatagtaggaggcttggtaggtttaagaatagtttttgctgtactttctatagtgaatagagttaggcagggatattcaccattatcgtttcagacccacctcccaaccccgaggggacccgacaggcccgaaggaatagaagaagaaggtggagagagagacagagacagatccattcgattagtgaacggatcggcactgcgtgcgccaattctgcagacaaatggcagtattcatccacaattttaaaagaaaaggggggattggggggtacagtgcaggggaaagaatagtagacataatagcaacagacatacaaactaaagaattacaaaaacaaattacaaaaattcaaaattttcgggtttattacagggacagcagagatccagtttggttaattaaccaatcccctgggtcactttgctcttgtgcacgctttccagtctttcagcgtaagccagagtcattcccaaggatgctggtttctctctgggggaagagctgctctgtgatggagcccatgcgtgtcatctgagcctctggcttccctgccagtgcagccctggcagtgtcctacttcccagggctgttgtctgcctggcgggaaggtcctgggcaaaggatcagtctttgtactctgagagcagactacttggctcctctctgttttttatcagcgaagttggatatatctctcccacatttccctaatcatatgctatatattggctttttttttcttctctagcccccaaatacatcaagatgtttgtactggatgaagctgacgaaatgttaagccgtggattcaaggaccagatctatgacatattccaaaagctcaacagcaacacccaggtgagggcagtcttgcttgaatagctaatgattcttgaaaaatagtaagtgccaggggaaccatatactggattcttgagcctttttatgcatctgcttcagttttaggtgtggctagggaagggagcaggcctcaggaaggaaccagcactctaagactggcctttttttccactaggtagttttgctgtcagccacaatgccttctgatgtgcttgaggtgaccaagaagttcatgagggaccccattcggattcttgtcaagaaggaagagttgaccctggagggtatccgccagttctacatcaacgtggaacgagaggtggggcccagtgcaggaggcgggcctggtagtgagttgttgggtatagcccctgactgatttttgtcccccaacctccaggagtggaagctggacacactatgtgacttgtatgaaaccctgaccatcacccaggcagtcatcttcatcaacacccggaggaaggtggactggctcaccgagaagatgcatgctcgagatttcactgtatccgccatggtgtgtttgcccgctgccagcctgttgtgggtctgcccgtcagaagtgtcctacttgaagccagggttcctggaacccaggtgcctacctggtctgctgcatatttgttttctcttccagcatggagatatggaccaaaaggaacgagacgtgattatgagggagtttcgttctggctctagcagagttttgattaccactgacctgctggtgagtagagggaactgatagcaaaggcagaagggaggatccaaggtgattccctctccaaggggacatcagtgcctctcaggaaagtagcagcttggaatagaatctggcatgcctaaggcctttggggaactgggatgcttatttcctctgccttccttggctgcccacatggatgcctaagtgtcttccctccgggatagagtgtcctccgtgcacatgctgaagagttgtctttcttgacgtaggccagaggcattgatgtgcagcaggtttctttagtcatcaactatgaccttcccaccaacagggaaaactatatccacaggtaagcgtagatctggaacactcccctaccccttcacacctggccctccctgggcttaaagctcctgatattcctcatccccttccttgttttccagaatcggtcgaggtggacggtttggccgtaaaggtgtggctattaacatggtgacagaagaagacaagaggactcttcgagacattgagaccttctacaacacctccattgaggaaatgcccctcaatgttgctgacctcatctgaggggctgtcctgccacccagccccagccagggctcaatctctgggggctgaggagcagcaggaggggggagggaagggagccaagggatggacatcttgtcattttttttctttgaataaatgtcactttttgaggcaaaagaaggaaccgtgaacattttagacacccttttctttggggtaggctcttgccccaggcgccggctcttctcccaaaaaaaaaaaaaaaacactaatccatttccctaacctagtaacctccagatcccagaggctctcctcacctcagctgagctcctttgaaagtgattcaagggactatgtcactcagcctcatttgctggaccaaatctggagggagaacccctaaaacccctaagtgaggttgcccagggggttgtccccaggtggggggaagcaggggagagaaaatggtagccatttttacattgttttgtatagtatttattgattcaggaaacaaacacaaaattctgaataaaatgacttggaaactgcctgtttgggcttctcatttcttacctccccttccctctcccacctgctactgggtgcatctctgctccccccttccccagcagatggttacctttgggctgttgctttcttgtcaccatctgagttctcagacgctggaaagccatgttctcggctctgtgaatgacaatgctgactggagtgctgcccctctgtaaagggctgggtgtggatggtcacaagcccctcacatgcctcagccaagaggaagtagtacaggggtcagcccagaggtccaggggaaaggagtggaaaccgatttccccaccaagggaggggcctgtacctcagctgttcccatagctacttgccacaactgccaagcaagtttcgctgagtttgacacatggatccctgtggatcaactgccctaggactccgtttgcacccatgtgacactgttgactttgccctgatgaagcagggccaacagtcccctaacttaattacaaaaactaatgactaagagagaggtggctagagctgaggcccctgagtcaggctgtgggtgggatcatctccagtacaggaagtgagactttcatttcctcctttccaagagagggctgagggagcagggttgagcaactggtgcagacagcctagctggactttgggtgaggcggttcagcctgctggggctactggcaggtaaggaggaaggaggctgaggggagggggcccctgggagggagcctgccctgggttgctaaccatctcctctctgccaaaagcccaggggaccggatccccgggtaccggtcgtacgttcgaagctagcgccaccatggatatgcgcgtacccgctcaacttctgggtttgttgctgctttggctcaggggagcccgctgtgccgcgcttgtccctgaaaaggagaaggaccccaaatattggagagaccaggctcaggaaaccctcaagtacgctcttgaactgcaaaagcttaatactaacgtggctaaaaacgtgataatgttcttgggggacggaatgggggtttcaaccgttaccgcggccagaatcttgaaagggcagctgcaccataacccaggcgaagaaacgaggctggagatggacaaatttccattcgtggcgctttctaagacctacaacactaacgcccaggtccctgactcagctggtacggccactgcctacctttgtggagtgaaggcaaatgaggggactgttggtgtttccgcagctactgagagatctcggtgtaatacgactcaaggtaatgaagttacatccatactccgatgggcaaaagacgcgggcaaatctgttgggattgttacaactactagggtgaaccatgcgacaccctctgcagcttatgcgcacagtgccgaccgagactggtattcagataatgagatgccacccgaggcccttagccagggctgcaaggacatagcctatcaattgatgcacaatatcagagacatagacgttataatgggtggtggtcgcaagtacatgtaccccaaaaacaaaaccgacgtagagtatgaatccgatgaaaaagctaggggcaccagactcgacggacttgatctggttgatacatggaagagcttcaagcccagatacaagcattcacatttcatctggaacaggaccgaacttctcacattggacccccacaatgttgactatctcctcggtttgtttgaaccaggggatatgcagtatgagctcaatcggaacaacgtcactgaccccagtttgagtgaaatggtcgttgttgcaatacaaattttgaggaaaaatccaaaggggtttttcttgttggtagagggcggacggatagatcacgggcaccacgaaggcaaagcaaaacaggccctgcacgaagccgttgaaatggatcgcgctatcggtcaagccggctccctgacgagtagtgaagataccttgaccgtcgtcactgcggatcatagccacgtttttacctttgggggatacacccccaggggcaactcaatttttggacttgcaccgatgctcagcgacacagataaaaagccttttactgcgattctgtatggcaacggccctggatacaaagtagtagggggtgaaagggaaaacgtcagcatggtggactatgcacacaataattatcaggcgcagtccgctgttccgctgcggcatgagactcacgggggagaggacgttgctgtcttttccaagggaccaatggctcatcttctccatggagtccatgagcaaaattatgtccctcatgtcatggcatacgctgcatgtataggagcaaatctcgggcactgtgcaccggcgtcctccctcaaggataagacccacacctgtcctccttgccccgctccagagctgctgggcggccctagcgtgtttctgttccctcctaagcccaaggacacactgatgatctccagaacccctgaggtgacctgtgtggtggtcgacgtgtctcacgaagatcctgaagtgaaatttaactggtacgtggacggcgtggaagtccataatgccaaaaccaagcccagagaggaacagtacaacagcacatatagagtggtgtccgtcctgacagtgctgcaccaggactggctgaatggaaaagagtacaagtgcaaggtgtctaacaaggctctgcctgccccaatcgagaagaccatcagcaaggccaagggccagcctcgggaaccccaggtttacaccctgcctcctagcagagatgagctgacaaagaaccaggtgtccctgacctgcctggtgaaaggcttctaccccagcgacatcgccgtggaatgggagagcaacggacaacctgagaacaactacaagacaacccctccagtgctggactctgatggcagcttcttcctgtacagcaagctgaccgtggacaagagccggtggcagcagggcaacgtgttcagctgcagcgtgatgcacgaggccctgcacaaccactacactcagaaaagcctgtctctgagccccggcaaggacatcgattccagcgacagttcagacagctctgacagctccgattcctccgactcaagttgagaattcgatatcaagcttatcgataatcaacctctggattacaaaatttgtgaaagattgactggtattcttaactatgttgctccttttacgctatgtggatacgctgctttaatgcctttgtatcatgctattgcttcccgtatggctttcattttctcctccttgtataaatcctggttgctgtctctttatgaggagttgtggcccgttgtcaggcaacgtggcgtggtgtgcactgtgtttgctgacgcaacccccactggttggggcattgccaccacctgtcagctcctttccgggactttcgctttccccctccctattgccacggcggaactcatcgccgcctgccttgcccgctgctggacaggggctcggctgttgggcactgacaattccgtggtgttgtcggggaaatcatcgtcctttccttggctgctcgcctgtgttgccacctggattctgcgcgggacgtccttctgctacgtcccttcggccctcaatccagcggaccttccttcccgcggcctgctgccggctctgcggcctcttccgcgtcttcgccttcgccctcagacgagtcggatctccctttgggccgcctccccgcatcgataccgtcgacctcgatcgagacctagaaaaacatggagcaatcacaagtagcaatacagcagctaccaatgctgattgtgcctggctagaagcacaagaggaggaggaggtgggttttccagtcacacctcaggtacctttaagaccaatgacttacaaggcagctgtagatcttagccactttttaaaagaaaaggggggactggaagggctaattcactcccaacgaagacaagatatccttgatctgtggatctaccacacacaaggctacttccctgattggcagaactacacaccagggccagggatcagatatccactgacctttggatggtgctacaagctagtaccagttgagcaagagaaggtagaagaagccaatgaaggagagaacacccgcttgttacaccctgtgagcctgcatgggatggatgacccggagagagaagtattagagtggaggtttgacagccgcctagcatttcatcacatggcccgagagctgcatccggactgtactgggtctctctggttagaccagatctgagcctgggagctctctggctaactagggaacccactgcttaagcctcaataaagcttgccttgagtgcttcaagtagtgtgtgcccgtctgttgtgtgactctggtaactagagatccctcagacccttttagtcagtgtggaaaatctctagcagggcccgtttaaacccgctgatcagcctcgactgtgccttctagttgccagccatctgttgtttgcccctcccccgtgccttccttgaccctggaaggtgccactcccactgtcctttcctaataaaatgaggaaattgcatcgcattgtctgagtaggtgtcattctattctggggggtggggtggggcaggacagcaagggggaggattgggaagacaatagcaggcatgctggggatgcggtgggctctatggcttctgaggcggaaagaaccagctggggctctagggggtatccccacgcgccctgtagcggcgcattaagcgcggcgggtgtggtggttacgcgcagcgtgaccgctacacttgccagcgccctagcgcccgctcctttcgctttcttcccttcctttctcgccacgttcgccggctttccccgtcaagctctaaatcgggggctccctttagggttccgatttagtgctttacggcacctcgaccccaaaaaacttgattagggtgatggttcacgtagtgggccatcgccctgatagacggtttttcgccctttgacgttggagtccacgttctttaatagtggactcttgttccaaactggaacaacactcaaccctatctcggtctattcttttgatttataagggattttgccgatttcggcctattggttaaaaaatgagctgatttaacaaaaatttaacgcgaattaattctgtggaatgtgtgtcagttagggtgtggaaagtccccaggctccccagcaggcagaagtatgcaaagcatgcatctcaattagtcagcaaccaggtgtggaaagtccccaggctccccagcaggcagaagtatgcaaagcatgcatctcaattagtcagcaaccatagtcccgcccctaactccgcccatcccgcccctaactccgcccagttccgcccattctccgccccatggctgactaattttttttatttatgcagaggccgaggccgcctctgcctctgagctattccagaagtagtgaggaggcttttttggaggcctaggcttttgcaaaaagctcccgggagcttgtatatccattttcggatctgatcagcacgtgttgacaattaatcatcggcatagtatatcggcatagtataatacgacaaggtgaggaactaaaccatggccaagttgaccagtgccgttccggtgctcaccgcgcgcgacgtcgccggagcggtcgagttctggaccgaccggctcgggttctcccgggacttcgtggaggacgacttcgccggtgtggtccgggacgacgtgaccctgttcatcagcgcggtccaggaccaggtggtgccggacaacaccctggcctgggtgtgggtgcgcggcctggacgagctgtacgccgagtggtcggaggtcgtgtccacgaacttccgggacgcctccgggccggccatgaccgagatcggcgagcagccgtgggggcgggagttcgccctgcgcgacccggccggcaactgcgtgcacttcgtggccgaggagcaggactgacacgtgctacgagatttcgattccaccgccgccttctatgaaaggttgggcttcggaatcgttttccgggacgccggctggatgatcctccagcgcggggatctcatgctggagttcttcgcccaccccaacttgtttattgcagcttataatggttacaaataaagcaatagcatcacaaatttcacaaataaagcatttttttcactgcattctagttgtggtttgtccaaactcatcaatgtatcttatcatgtctgtataccgtcgacctctagctagagcttggcgtaatcatggtcatagctgtttcctgtgtgaaattgttatccgctcacaattccacacaacatacgagccggaagcataaagtgtaaagcctggggtgcctaatgagtgagctaactcacattaattgcgttgcgctcactgcccgctttccagtcgggaaacctgtcgtgccagctgcattaatgaatcggccaacgcgcggggagaggcggtttgcgtattgggcgctcttccgcttcctcgctcactgactcgctgcgctcggtcgttcggctgcggcgagcggtatcagctcactcaaaggcggtaatacggttatccacagaatcaggggataacgcaggaaagaacatgtgagcaaaaggccagcaaaaggccaggaaccgtaaaaaggccgcgttgctggcgtttttccataggctccgcccccctgacgagcatcacaaaaatcgacgctcaagtcagaggtggcgaaacccgacaggactataaagataccaggcgtttccccctggaagctccctcgtgcgctctcctgttccgaccctgccgcttaccggatacctgtccgcctttctcccttcgggaagcgtggcgctttctcatagctcacgctgtaggtatctcagttcggtgtaggtcgttcgctccaagctgggctgtgtgcacgaaccccccgttcagcccgaccgctgcgccttatccggtaactatcgtcttgagtccaacccggtaagacacgacttatcgccactggcagcagccactggtaacaggattagcagagcgaggtatgtaggcggtgctacagagttcttgaagtggtggcctaactacggctacactagaagaacagtatttggtatctgcgctctgctgaagccagttaccttcggaaaaagagttggtagctcttgatccggcaaacaaaccaccgctggtagcggtggtttttttgtttgcaagcagcagattacgcgcagaaaaaaaggatctcaagaagatcctttgatcttttctacggggtctgacgctcagtggaacgaaaactcacgttaagggattttggtcatgagattatcaaaaaggatcttcacctagatccttttaaattaaaaatgaagttttaaatcaatctaaagtatatatgagtaaacttggtctgacagttaccaatgcttaatcagtgaggcacctatctcagcgatctgtctatttcgttcatccatagttgcctgactccccgtcgtgtagataactacgatacgggagggcttaccatctggccccagtgctgcaatgataccgcgagacccacgctcaccggctccagatttatcagcaataaaccagccagccggaagggccgagcgcagaagtggtcctgcaactttatccgcctccatccagtctattaattgttgccgggaagctagagtaagtagttcgccagttaatagtttgcgcaacgttgttgccattgctacaggcatcgtggtgtcacgctcgtcgtttggtatggcttcattcagctccggttcccaacgatcaaggcgagttacatgatcccccatgttgtgcaaaaaagcggttagctccttcggtcctccgatcgttgtcagaagtaagttggccgcagtgttatcactcatggttatggcagcactgcataattctcttactgtcatgccatccgtaagatgcttttctgtgactggtgagtactcaaccaagtcattctgagaatagtgtatgcggcgaccgagttgctcttgcccggcgtcaatacgggataataccgcgccacatagcagaactttaaaagtgctcatcattggaaaacgttcttcggggcgaaaactctcaaggatcttaccgctgttgagatccagttcgatgtaacccactcgtgcacccaactgatcttcagcatcttttactttcaccagcgtttctgggtgagcaaaaacaggaaggcaaaatgccgcaaaaaagggaataagggcgacacggaaatgttgaatactcatactcttcctttttcaatattattgaagcatttatcagggttattgtctcatgagcggatacatatttgaatgtatttagaaaaataaacaaataggggttccgcgcacatttccccgaaaagtgccacctgacgtcgacggatcgggagatctcccgatcccctatggtgcactctcagtacaatctgctctgatgccgcatagttaagccagtatctgctccctgcttgtgtgttggaggtcgctgagtagtgcgcgagcaaaatttaagctacaacaaggcaaggcttgaccgacaattgcatgaagaatctgcttagggttaggcgttttgcgctgcttcgcgatgtacgggccagatatacgcgttgacattgattattgactagttattaatagtaatcaattacggggtcattagttcatagcccatatatggagttccgcgttacataacttacggtaaatggcccgcctggctgaccgcccaacgacccccgcccattgacgtcaataatgacgtatgttcccatagtaacgccaatagggactttccattgacgtcaatgggtggagtatttacggtaaactgcccacttggcagtacatcaagtgtatcatatgccaagtacgccccctattgacgtcaatgacggtaaatggcccgcctggcattatgcccagtacatgaccttatgggactttcctacttggcagtacatctacgtattagtcatcgctattaccatggtgatgcggttttggcagtacatcaatgggcgtggatagcggtttgactcacggggatttccaagtctccaccccattgacgtcaatgggagtttgttttggcaccaaaatcaacgggactttccaaaatgtcgtaacaactccgccccattgacgcaaatgggcggtaggcgtgtacggtgggaggtctatataagcagcgcgttttgcct

SEQ ID NO: 95 - DNA, 10461 bp, synthetic construct
  misc_feature 1..10461: note = Synthetic: FG12W-EFS-kozak-IgKVIII-RMP5-miR362A-Fc-DSS6
  source 1..10461: mol_type = other DNA
gtactgggtctctctggttagaccagatctgagcctgggagctctctggctaactagggaacccactgcttaagcctcaataaagcttgccttgagtgcttcaagtagtgtgtgcccgtctgttgtgtgactctggtaactagagatccctcagacccttttagtcagtgtggaaaatctctagcagtggcgcccgaacagggacttgaaagcgaaagggaaaccagaggagctctctcgacgcaggactcggcttgctgaagcgcgcacggcaagaggcgaggggcggcgactggtgagtacgccaaaaattttgactagcggaggctagaaggagagagatgggtgcgagagcgtcagtattaagcgggggagaattagatcgcgatgggaaaaaattcggttaaggccagggggaaagaaaaaatataaattaaaacatatagtatgggcaagcagggagctagaacgattcgcagttaatcctggcctgttagaaacatcagaaggctgtagacaaatactgggacagctacaaccatcccttcagacaggatcagaagaacttagatcattatataatacagtagcaaccctctattgtgtgcatcaaaggatagagataaaagacaccaaggaagctttagacaagatagaggaagagcaaaacaaaagtaagaccaccgcacagcaagcggccgctgatcttcagacctggaggaggagatatgagggacaattggagaagtgaattatataaatataaagtagtaaaaattgaaccattaggagtagcacccaccaaggcaaagagaagagtggtgcagagagaaaaaagagcagtgggaataggagctttgttccttgggttcttgggagcagcaggaagcactatgggcgcagcgtcaatgacgctgacggtacaggccagacaattattgtctggtatagtgcagcagcagaacaatttgctgagggctattgaggcgcaacagcatctgttgcaactcacagtctggggcatcaagcagctccaggcaagaatcctggctgtggaaagatacctaaaggatcaacagctcctggggatttggggttgctctggaaaactcatttgcaccactgctgtgccttggaatgctagttggagtaataaatctctggaacagatttggaatcacacgacctggatggagtgggacagagaaattaacaattacacaagcttaatacactccttaattgaagaatcgcaaaaccagcaagaaaagaatgaacaagaattattggaattagataaatgggcaagtttgtggaattggtttaacataacaaattggctgtggtatataaaattattcataatgatagtaggaggcttggtaggtttaagaatagtttttgctgtactttctatagtgaatagagttaggcagggatattcaccattatcgtttcagacccacctcccaaccccgaggggacccgacaggcccgaaggaatagaagaagaaggtggagagagagacagagacagatccattcgattagtgaacggatcggcactgcgtgcgccaattctgcagacaaatggcagtattcatccacaattttaaaagaaaaggggggattggggggtacagtgcaggggaaagaatagtagacataatagcaacagacatacaaactaaagaattacaaaaacaaattacaaaaattcaaaattttcgggtttattacagggacagcagagatccagtttggttaattaaggatatcggctccggtgcccgtcagtgggcagagcgcacatcgcccacagtccccgagaagttggggggaggggtcggcaattgaaccggtgcctagagaaggtggcgcggggtaaactgggaaagtgatgtcgtgtactggctccgcctttttcccgagggtgggggagaaccgtatataagtgcagtagtcgccgtgaacgttcttttcgcaacgggtttgccgccagaacacagggctagcgccaccatggatatgcgcgtacccgctcaacttctgggtttgttgctgctttggctcaggggagcccgctgtgccgcgcttgtccctgaaaaggagaaggaccccaaatattggagagaccaggctcaggaaaccctcaagtacgctcttgaactgcaaaagcttaatactaacgtggctaaaaacgtgataatgttcttgggggacggaatgggggtttcaaccgttaccgcggccagaatcttgaaagggcagctgcaccataacccaggcgaagaaacgaggctggagatggacaaatttccattcgtggcgctttctaagacctacaacactaacgcccaggtccctgactcagctggtacggccactgcctacctttgtggagtgaaggcaaatgaggggactgttggtgtttccgcagctactgagagatctcggtgtaatacgactcaaggtaatgaagttacatccatactccgatgggcaaaagacgcgggcaaatctgttgggattgttacaactactagggtgaaccatgcgacaccctctgcagcttatgcgcacagtgccgaccgagactggtattcagataatgagatgccacccgaggcccttagccagggctgcaaggacatagcctatcaattgatgcacaatatcagagacatagacgttataatgggtggtggtcgcaagtacatgtaccccaaaaacaaaaccgacgtagagtatgaatccgatgaaaaagctaggggcaccagactcgacggacttgatctggttgatacatggaagagcttcaagcccagatacaagcattcacatttcatctggaacaggaccgaacttctcacattggacccccacaatgttgactatctcctcggtttgtttgaaccaggggatatgcagtatgagctcaatcggaacaacgtcactgaccccagtttgagtgaaatggtcgttgttgcaatacaaattttgaggaaaaatccaaaggggtttttcttgttggtagagggcggacggatagatcacgggcaccacgaaggcaaagcaaaacaggccctgcacgaagccgttgaaatggatcgcgctatcggtcaagccggctccctgacgagtagtgaagataccttgaccgtcgtcactgcggatcatagccacgtttttacctttgggggatacacccccaggggcaactcaatttttggacttgcaccgatgctcagcgacacagataaaaagccttttactgcgattctgtatggcaacggccctggatacaaagtagtagggggtgaaagggaaaacgtcagcatggtggactatgcacacaataattatcaggcgcagtccgctgttccgctgcggcatgagactcacgggggagaggacgttgctgtcttttccaagggaccaatggctcatcttctccatggagtccatgagcaaaattatgtccctcatgtcatggcatacgctgcatgtataggagcaaatctcgggcactgtgcaccggcgtcctccctcaaagacaaaacacacacttgtccaccttgcccggcacctgaacttctgggcggcccgagcgtttttttgttccctcctaaacctaaggacacgctcatgatcagccgcacgccagaggttacctgtgtagtggtggatgtcagccacgaggatccggaagtaaaattcaactggtatgtagatggggtggaggttcacaatgccaaaaccaagccacgagaggaacagtacaatagtacttaccgggtcgtgtctgtattgaccgtcctgcatcaggattggttgaacgggaaagaatataagtgcaaggtgagcaacaaagcacttccggccccaatagagaaaacaattagtaaagcaaaaggacaaccacgggaaccgcaagtttatacactgccgccctctcgagacgagctgaccaaaaatcaggttagccttacatgtttggtcaaggggttctacccgagtgatattgcagtggaatgggaatccaacggtcaaccagaaaataactacaaaactactccgccggtgttggattcagacggctctttctttctgtatagcaaactcactgttgacaagtcaagatggcagcagggcaatgtatttagctgtagtgttatgcacgaagctcttcataaccactacacacaaaagtcactttctctttccccaggaaaagacatcgattccagcgacagttcagacagctctgacagctccgattcctccgactcaagttgagaattcgatatcaagcttatcgataatcaacctctggattacaaaatttgtgaaagattgactggtattcttaactatgttgctccttttacgctatgtggatacgctgctttaatgcctttgtatcatgctattgcttcccgtatggctttcattttctcctccttgtataaatcctggttgctgtctctttatgaggagttgtggcccgttgtcaggcaacgtggcgtggtgtgcactgtgtttgctgacgcaacccccactggttggggcattgccaccacctgtcagctcctttccgggactttcgctttccccctccctattgccacggcggaactcatcgccgcctgccttgcccgctgctggacaggggctcggctgttgggcactgacaattccgtggtgttgtcggggaaatcatcgtcctttccttggctgctcgcctgtgttgccacctggattctgcgcgggacgtccttctgctacgtcccttcggccctcaatccagcggaccttccttcccgcggcctgctgccggctctgcggcctcttccgcgtcttcgccttcgccctcagacgagtcggatctccctttgggccgcctccccgcatcgataccgtcgacctcgagacctagaaaaacatggagcaatcacaagtagcaatacagcagctaccaatgctgattgtgcctggctagaagcacaagaggaggaggaggtgggttttccagtcacacctcaggtacctttaagaccaatgacttacaaggcagctgtagatcttagccactttttaaaagaaaaggggggactggaagggctaattcactcccaacgaagacaagatatccttgatctgtggatctaccacacacaaggctacttccctgattggcagaactacacaccagggccagggatcagatatccactgacctttggatggtgctacaagctagtaccagttgagcaagagaaggtagaagaagccaatgaaggagagaacacccgcttgttacaccctgtgagcctgcatgggatggatgacccggagagagaagtattagagtggaggtttgacagccgcctagcatttcatcacatggcccgagagctgcatccggactgtactgggtctctctggttagaccagatctgagcctgggagctctctggctaactagggaacccactgcttaagcctcaataaagcttgccttgagtgcttcaagtagtgtgtgcccgtctgttgtgtgactctggtaactagagatccctcagacccttttagtcagtgtggaaaatctctagcagggcccgtttaaacccgctgatcagcctcgactgtgccttctagttgccagccatctgttgtttgcccctcccccgtgccttccttgaccctggaaggtgccactcccactgtcctttcctaataaaatgaggaaattgcatcgcattgtctgagtaggtgtcattctattctggggggtggggtggggcaggacagcaagggggaggattgggaagacaatagcaggcatgctggggatgcggtgggctctatggcttctgaggcggaaagaaccagctggggctctagggggtatccccacgcgccctgtagcggcgcattaagcgcggcgggtgtggtggttacgcgcagcgtgaccgctacacttgccagcgccctagcgcccgctcctttcgctttcttcccttcctttctcgccacgttcgccggctttccccgtcaagctctaaatcgggggctccctttagggttccgatttagtgctttacggcacctcgaccccaaaaaacttgattagggtgatggttcacgtagtgggccatcgccctgatagacggtttttcgccctttgacgttggagtccacgttctttaatagtggactcttgttccaaactggaacaacactcaaccctatctcggtctattcttttgatttataagggattttgccgatttcggcctattggttaaaaaatgagctgatttaacaaaaatttaacgcgaattaattctgtggaatgtgtgtcagttagggtgtggaaagtccccaggctccccagcaggcagaagtatgcaaagcatgcatctcaattagtcagcaaccaggtgtggaaagtccccaggctccccagcaggcagaagtatgcaaagcatgcatctcaattagtcagcaaccatagtcccgcccctaactccgcccatcccgcccctaactccgcccagttccgcccattctccgccccatggctgactaattttttttatttatgcagaggccgaggccgcctctgcctctgagctattccagaagtagtgaggaggcttttttggaggcctaggcttttgcaaaaagctcccgggagcttgtatatccattttcggatctgatcagcacgtgttgacaattaatcatcggcatagtatatcggcatagtataatacgacaaggtgaggaactaaaccatggccaagttgaccagtgccgttccggtgctcaccgcgcgcgacgtcgccggagcggtcgagttctggaccgaccggctcgggttctcccgggacttcgtggaggacgacttcgccggtgtggtccgggacgacgtgaccctgttcatcagcgcggtccaggaccaggtggtgccggacaacaccctggcctgggtgtgggtgcgcggcctggacgagctgtacgccgagtggtcggaggtcgtgtccacgaacttccgggacgcctccgggccggccatgaccgagatcggcgagcagccgtgggggcgggagttcgccctgcgcgacccggccggcaactgcgtgcacttcgtggccgaggagcaggactgacacgtgctacgagatttcgattccaccgccgccttctatgaaaggttgggcttcggaatcgttttccgggacgccggctggatgatcctccagcgcggggatctcatgctggagttcttcgcccaccccaacttgtttattgcagcttataatggttacaaataaagcaatagcatcacaaatttcacaaataaagcatttttttcactgcattctagttgtggtttgtccaaactcatcaatgtatcttatcatgtctgtataccgtcgacctctagctagagcttggcgtaatcatggtcatagctgtttcctgtgtgaaattgttatccgctcacaattccacacaacatacgagccggaagcataaagtgtaaagcctggggtgcctaatgagtgagctaactcacattaattgcgttgcgctcactgcccgctttccagtcgggaaacctgtcgtgccagctgcattaatgaatcggccaacgcgcggggagaggcggtttgcgtattgggcgctcttccgcttcctcgctcactgactcgctgcgctcggtcgttcggctgcggcgagcggtatcagctcactcaaaggcggtaatacggttatccacagaatcaggggataacgcaggaaagaacatgtgagcaaaaggccagcaaaaggccaggaaccgtaaaaaggccgcgttgctggcgtttttccataggctccgcccccctgacgagcatcacaaaaatcgacgctcaagtcagaggtggcgaaacccgacaggactataaagataccaggcgtttccccctggaagctccctcgtgcgctctcctgttccgaccctgccgcttaccggatacctgtccgcctttctcccttcgggaagcgtggcgctttctcatagctcacgctgtaggtatctcagttcggtgtaggtcgttcgctccaagctgggctgtgtgcacgaaccccccgttcagcccgaccgctgcgccttatccggtaactatcgtcttgagtccaacccggtaagacacgacttatcgccactggcagcagccactggtaacaggattagcagagcgaggtatgtaggcggtgctacagagttcttgaagtggtggcctaactacggctacactagaagaacagtatttggtatctgcgctctgctgaagccagttaccttcggaaaaagagttggtagctcttgatccggcaaacaaaccaccgctggtagcggtggtttttttgtttgcaagcagcagattacgcgcagaaaaaaaggatctcaagaagatcctttgatcttttctacggggtctgacgctcagtggaacgaaaactcacgttaagggattttggtcatgagattatcaaaaaggatcttcacctagatccttttaaattaaaaatgaagttttaaatcaatctaaagtatatatgagtaaacttggtctgacagttaccaatgcttaatcagtgaggcacctatctcagcgatctgtctatttcgttcatccatagttgcctgactccccgtcgtgtagataactacgatacgggagggcttaccatctggccccagtgctgcaatgataccgcgagacccacgctcaccggctccagatttatcagcaataaaccagccagccggaagggccgagcgcagaagtggtcctgcaactttatccgcctccatccagtctattaattgttgccgggaagctagagtaagtagttcgccagttaatagtttgcgcaacgttgttgccattgctacaggcatcgtggtgtcacgctcgtcgtttggtatggcttcattcagctccggttcccaacgatcaaggcgagttacatgatcccccatgttgtgcaaaaaagcggttagctccttcggtcctccgatcgttgtcagaagtaagttggccgcagtgttatcactcatggttatggcagcactgcataattctcttactgtcatgccatccgtaagatgcttttctgtgactggtgagtactcaaccaagtcattctgagaatagtgtatgcggcgaccgagttgctcttgcccggcgtcaatacgggataataccgcgccacatagcagaactttaaaagtgctcatcattggaaaacgttcttcggggcgaaaactctcaaggatcttaccgctgttgagatccagttcgatgtaacccactcgtgcacccaactgatcttcagcatcttttactttcaccagcgtttctgggtgagcaaaaacaggaaggcaaaatgccgcaaaaaagggaataagggcgacacggaaatgttgaatactcatactcttcctttttcaatattattgaagcatttatcagggttattgtctcatgagcggatacatatttgaatgtatttagaaaaataaacaaataggggttccgcgcacatttccccgaaaagtgccacctgacgtcgacggatcgggagatctcccgatcccctatggtgcactctcagtacaatctgctctgatgccgcatagttaagccagtatctgctccctgcttgtgtgttggaggtcgctgagtagtgcgcgagcaaaatttaagctacaacaaggcaaggcttgaccgacaattgcatgaagaatctgcttagggttaggcgttttgcgctgcttcgcgatgtacgggccagatatacgcgttgacattgattattgactagttattaatagtaatcaattacggggtcattagttcatagcccatatatggagttccgcgttacataacttacggtaaatggcccgcctggctgaccgcccaacgacccccgcccattgacgtcaataatgacgtatgttcccatagtaacgccaatagggactttccattgacgtcaatgggtggagtatttacggtaaactgcccacttggcagtacatcaagtgtatcatatgccaagtacgccccctattgacgtcaatgacggtaaatggcccgcctggcattatgcccagtacatgaccttatgggactttcctacttggcagtacatctacgtattagtcatcgctattaccatggtgatgcggttttggcagtacatcaatgggcgtggatagcggtttgactcacggggatttccaagtctccaccccattgacgtcaatgggagtttgttttggcaccaaaatcaacgggactttccaaaatgtcgtaacaactccgccccattgacgcaaatgggcggtaggcgtgtacggtgggaggtctatataagcagcgcgttttgcct

SEQ ID NO: 96 - DNA, 1799 bp, Homo sapiens
  misc_feature 1..1799: note = CD11b promoter
  source 1..1799: mol_type = genomic DNA
tgcaaatatatatatatatatatatttttttttttttttagagataagagtcttgctctgtcgcctaggctggagtgcagtggcacaatctctgctcactgcaacctccgcctccagggttcaagtgattctgctgcctcagcctcccaggtgggattacaggtgcctgccaccacgcctggctaatttttttgtctttttagtaaagatgaggtttcaccatgttgggcaggctggtttcaattgctgacctcaagtgagccaccccgcctcagcctcccaaaatgctaggattacaggcatgagccaccgcacccagccaagtttgtacatatatttttgactacacttcttaactattcttaggataaattactagaagtgaaaattcttgggtgaagagcttgaggcctttacacacacacacacacacacacacacacacacacaaataggctggatgcagtggctcacacctgtaatctcagcagtttgggaggctgaggaaggaggatcacttgagtccaggaggttgagaatagcctgaacaacatagcaagatcttgtctctacaaaaaatttaaaaaaaattagctggccatggcagcatgtgcctgtagtaccagctactcggaaggctgaggtaggaggatcgcttgagcccaggaggttgattgaagctgcagtgagctgtgattacaccactgcactccagcctgggcaacagagctagactctgtctctaaaaaaagcacaaaataatatttaaaaagcaccaggtatgcctgtacttgagttgtctttgttgatggctacaaatgaggacagctctggctgaagggcgcttccatttccatgggctgaaggagggacattttgcaaagtgtgttttcaggaagacacagagttttacctcctacacttgtttgatctgtattaatgtttgcttatttatttatttaattttttttttgagacagagtctcactctgtcacctgggctggagtgcagtggcattattgaggctcattgcagtctcagactcctgagctcaaacaatcctcctgcctcagcctctggagtagctaggactacaggcatgtgccaccatgcctggctaattttttaaatgtatttttttgtagagtcggggtctccctatgttgcccaggctggagtgcagtggtgtgatcctagctcactgcagcctggacctcgggctcaagtaattctcacacctcagcctgtccagtagcaggggctacaggcgcgcaccaccatgcccagctaattaaaaatatttttttgtagagacagggtctctctatgttgcccaggctggtttcaaactcccaggctcaagcaatcctcctgccttggcctcccaaagtgctggcattacaggcgtgagccactgcgcctggcccgtattaatgtttagaacacgaattccaggaggcaggctaagtctattcagcttgttcatatgcttgggccaacccaagaaacaagtgggtgacaaatggcaccttttggatagtggtattgactttgaaagtttgggtcaggaagctggggaggaagggtgggcaggctgtgggcagtcctgggcggaagaccaggcagggctatgtgctcactgagcctccgccctcttcctttgaatctctgatagacttctgcctcctacttctccttttctgcccttctttgctttggtggcttccttgtggttcctcagtggtgcctgcaacccctggttcacctccttccaggttctggctccttccagccttcg

SEQ ID NO: 97 - DNA, 11401 bp, synthetic construct
  misc_feature 1..11401: note = Synthetic: FG12W-EF1-alpha-I-kozak-IgKVIII-RMP5-miR362A-Fc-DSS6
  source 1..11401: mol_type = other DNA
gtactgggtctctctggttagaccagatctgagcctgggagctctctggctaactagggaacccactgcttaagcctcaataaagcttgccttgagtgcttcaagtagtgtgtgcccgtctgttgtgtgactctggtaactagagatccctcagacccttttagtcagtgtggaaaatctctagcagtggcgcccgaacagggacttgaaagcgaaagggaaaccagaggagctctctcgacgcaggactcggcttgctgaagcgcgcacggcaagaggcgaggggcggcgactggtgagtacgccaaaaattttgactagcggaggctagaaggagagagatgggtgcgagagcgtcagtattaagcgggggagaattagatcgcgatgggaaaaaattcggttaaggccagggggaaagaaaaaatataaattaaaacatatagtatgggcaagcagggagctagaacgattcgcagttaatcctggcctgttagaaacatcagaaggctgtagacaaatactgggacagctacaaccatcccttcagacaggatcagaagaacttagatcattatataatacagtagcaaccctctattgtgtgcatcaaaggatagagataaaagacaccaaggaagctttagacaagatagaggaagagcaaaacaaaagtaagaccaccgcacagcaagcggccgctgatcttcagacctggaggaggagatatgagggacaattggagaagtgaattatataaatataaagtagtaaaaattgaaccattaggagtagcacccaccaaggcaaagagaagagtggtgcagagagaaaaaagagcagtgggaataggagctttgttccttgggttcttgggagcagcaggaagcactatgggcgcagcgtcaatgacgctgacggtacaggccagacaattattgtctggtatagtgcagcagcagaacaatttgctgagggctattgaggcgcaacagcatctgttgcaactcacagtctggggcatcaagcagctccaggcaagaatcctggctgtggaaagatacctaaaggatcaacagctcctggggatttggggttgctctggaaaactcatttgcaccactgctgtgccttggaatgctagttggagtaataaatctctggaacagatttggaatcacacgacctggatggagtgggacagagaaattaacaattacacaagcttaatacactccttaattgaagaatcgcaaaaccagcaagaaaagaatgaacaagaattattggaattagataaatgggcaagtttgtggaattggtttaacataacaaattggctgtggtatataaaattattcataatgatagtaggaggcttggtaggtttaagaatagtttttgctgtactttctatagtgaatagagttaggcagggatattcaccattatcgtttcagacccacctcccaaccccgaggggacccgacaggcccgaaggaatagaagaagaaggtggagagagagacagagacagatccattcgattagtgaacggatcggcactgcgtgcgccaattctgcagacaaatggcagtattcatccacaattttaaaagaaaaggggggattggggggtacagtgcaggggaaagaatagtagacataatagcaacagacatacaaactaaagaattacaaaaacaaattacaaaaattcaaaattttcgggtttattacagggacagcagagatccagtttggttaattaaggctccggtgcccgtcagtgggcagagcgcacatcgcccacagtccccgagaagttggggggaggggtcggcaattgaaccggtgcctagagaaggtggcgcggggtaaactgggaaagtgatgtcgtgtactggctccgcctttttcccgagggtgggggagaaccgtatataagtgcagtagtcgccgtgaacgttctttttcgcaacgggtttgccgccagaacacaggtaagtgccgtgtgtggttcccgcgggcctggcctctttacgggttatggcccttgcgtgccttgaattacttccactggctgcagtacgtgattcttgatcccgagcttcgggttggaagtgggtgggagagttcgaggccttgcgcttaaggagccccttcgcctcgtgcttgagttgaggcctggcctgggcgctggggccgccgcgtgcgaatctggtggcaccttcgcgcctgtctcgctgctttcgataagtctctagccatttaaaatttttgatgacctgctgcgacgctttttttctggcaagatagtcttgtaaatgcgggccaagatctgcacactggtatttcggtttttggggccgcgggcggcgacggggcccgtgcgtcccagcgcacatgttcggcgaggcggggcctgcgagcgcggccaccgagaatcggacgggggtagtctcaagctggccggcctgctctggtgcctggcctcgcgccgccgtgtatcgccccgccctgggcggcaaggctggcccggtcggcaccagttgcgtgagcggaaagatggccgcttcccggccctgctgcagggagctcaaaatggaggacgcggcgctcgggagagcgggcgggtgagtcacccacacaaaggaaaagggcctttccgtcctcagccgtcgcttcatgtgactccacggagtaccgggcgccgtccaggcacctcgattagttctcgagcttttggagtacgtcgtctttaggttggggggaggggttttatgcgatggagtttccccacactgagtgggtggagactgaagttaggccagcttggcacttgatgtaattctccttggaatttgccctttttgagtttggatcttggttcattctcaagcctcagacagtggttcaaagtttttttcttccatttcaggtgtcgtgagctagcgccaccatggatatgcgcgtacccgctcaacttctgggtttgttgctgctttggctcaggggagcccgctgtgccgcgcttgtccctgaaaaggagaaggaccccaaatattggagagaccaggctcaggaaaccctcaagtacgctcttgaactgcaaaagcttaatactaacgtggctaaaaacgtgataatgttcttgggggacggaatgggggtttcaaccgttaccgcggccagaatcttgaaagggcagctgcaccataacccaggcgaagaaacgaggctggagatggacaaatttccattcgtggcgctttctaagacctacaacactaacgcccaggtccctgactcagctggtacggccactgcctacctttgtggagtgaaggcaaatgaggggactgttggtgtttccgcagctactgagagatctcggtgtaatacgactcaaggtaatgaagttacatccatactccgatgggcaaaagacgcgggcaaatctgttgggattgttacaactactagggtgaaccatgcgacaccctctgcagcttatgcgcacagtgccgaccgagactggtattcagataatgagatgccacccgaggcccttagccagggctgcaaggacatagcctatcaattgatgcacaatatcagagacatagacgttataatgggtggtggtcgcaagtacatgtaccccaaaaacaaaaccgacgtagagtatgaatccgatgaaaaagctaggggcaccagactcgacggacttgatctggttgatacatggaagagcttcaagcccagatacaagcattcacatttcatctggaacaggaccgaacttctcacattggacccccacaatgttgactatctcctcggtttgtttgaaccaggggatatgcagtatgagctcaatcggaacaacgtcactgaccccagtttgagtgaaatggtcgttgttgcaatacaaattttgaggaaaaatccaaaggggtttttcttgttggtagagggcggacggatagatcacgggcaccacgaaggcaaagcaaaacaggccctgcacgaagccgttgaaatggatcgcgctatcggtcaagccggctccctgacgagtagtgaagataccttgaccgtcgtcactgcggatcatagccacgtttttacctttgggggatacacccccaggggcaactcaatttttggacttgcaccgatgctcagcgacacagataaaaagccttttactgcgattctgtatggcaacggccctggatacaaagtagtagggggtgaaagggaaaacgtcagcatggtggactatgcacacaataattatcaggcgcagtccgctgttccgctgcggcatgagactcacgggggagaggacgttgctgtcttttccaagggaccaatggctcatcttctccatggagtccatgagcaaaattatgtccctcatgtcatggcatacgctgcatgtataggagcaaatctcgggcactgtgcaccggcgtcctccctcaaagacaaaacacacacttgtccaccttgcccggcacctgaacttctgggcggcccgagcgtttttttgttccctcctaaacctaaggacacgctcatgatcagccgcacgccagaggttacctgtgtagtggtggatgtcagccacgaggatccggaagtaaaattcaactggtatgtagatggggtggaggttcacaatgccaaaaccaagccacgagaggaacagtacaatagtacttaccgggtcgtgtctgtattgaccgtcctgcatcaggattggttgaacgggaaagaatataagtgcaaggtgagcaacaaagcacttccggccccaatagagaaaacaattagtaaagcaaaaggacaaccacgggaaccgcaagtttatacactgccgccctctcgagacgagctgaccaaaaatcaggttagccttacatgtttggtcaaggggttctacccgagtgatattgcagtggaatgggaatccaacggtcaaccagaaaataactacaaaactactccgccggtgttggattcagacggctctttctttctgtatagcaaactcactgttgacaagtcaagatggcagcagggcaatgtatttagctgtagtgttatgcacgaagctcttcataaccactacacacaaaagtcactttctctttccccaggaaaagacatcgattccagcgacagttcagacagctctgacagctccgattcctccgactcaagttgagaattcgatatcaagcttatcgataatcaacctctggattacaaaatttgtgaaagattgactggtattcttaactatgttgctccttttacgctatgtggatacgctgctttaatgcctttgtatcatgctattgcttcccgtatggctttcattttctcctccttgtataaatcctggttgctgtctctttatgaggagttgtggcccgttgtcaggcaacgtggcgtggtgtgcactgtgtttgctgacgcaacccccactggttggggcattgccaccacctgtcagctcctttccgggactttcgctttccccctccctattgccacggcggaactcatcgccgcctgccttgcccgctgctggacaggggctcggctgttgggcactgacaattccgtggtgttgtcggggaaatcatcgtcctttccttggctgctcgcctgtgttgccacctggattctgcgcgggacgtccttctgctacgtcccttcggccctcaatccagcggaccttccttcccgcggcctgctgccggctctgcggcctcttccgcgtcttcgccttcgccctcagacgagtcggatctccctttgggccgcctccccgcatcgataccgtcgacctcgagacctagaaaaacatggagcaatcacaagtagcaatacagcagctaccaatgctgattgtgcctggctagaagcacaagaggaggaggaggtgggttttccagtcacacctcaggtacctttaagaccaatgacttacaaggcagctgtagatcttagccactttttaaaagaaaaggggggactggaagggctaattcactcccaacgaagacaagatatccttgatctgtggatctaccacacacaaggctacttccctgattggcagaactacacaccagggccagggatcagatatccactgacctttggatggtgctacaagctagtaccagttgagcaagagaaggtagaagaagccaatgaaggagagaacacccgcttgttacaccctgtgagcctgcatgggatggatgacccggagagagaagtattagagtggaggtttgacagccgcctagcatttcatcacatggcccgagagctgcatccggactgtactgggtctctctggttagaccagatctgagcctgggagctctctggctaactagggaacccactgcttaagcctcaataaagcttgccttgagtgcttcaagtagtgtgtgcccgtctgttgtgtgactctggtaactagagatccctcagacccttttagtcagtgtggaaaatctctagcagggcccgtttaaacccgctgatcagcctcgactgtgccttctagttgccagccatctgttgtttgcccctcccccgtgccttccttgaccctggaaggtgccactcccactgtcctttcctaataaaatgaggaaattgcatcgcattgtctgagtaggtgtcattctattctggggggtggggtggggcaggacagcaagggggaggattgggaagacaatagcaggcatgctggggatgcggtgggctctatggcttctgaggcggaaagaaccagctggggctctagggggtatccccacgcgccctgtagcggcgcattaagcgcggcgggtgtggtggttacgcgcagcgtgaccgctacacttgccagcgccctagcgcccgctcctttcgctttcttcccttcctttctcgccacgttcgccggctttccccgtcaagctctaaatcgggggctccctttagggttccgatttagtgctttacggcacctcgaccccaaaaaacttgattagggtgatggttcacgtagtgggccatcgccctgatagacggtttttcgccctttgacgttggagtccacgttctttaatagtggactcttgttccaaactggaacaacactcaaccctatctcggtctattcttttgatttataagggattttgccgatttcggcctattggttaaaaaatgagctgatttaacaaaaatttaacgcgaattaattctgtggaatgtgtgtcagttagggtgtggaaagtccccaggctccccagcaggcagaagtatgcaaagcatgcatctcaattagtcagcaaccaggtgtggaaagtccccaggctccccagcaggcagaagtatgcaaagcatgcatctcaattagtcagcaaccatagtcccgcccctaactccgcccatcccgcccctaactccgcccagttccgcccattctccgccccatggctgactaattttttttatttatgcagaggccgaggccgcctctgcctctgagctattccagaagtagtgaggaggcttttttggaggcctaggcttttgcaaaaagctcccgggagcttgtatatccattttcggatctgatcagcacgtgttgacaattaatcatcggcatagtatatcggcatagtataatacgacaaggtgaggaactaaaccatggccaagttgaccagtgccgttccggtgctcaccgcgcgcgacgtcgccggagcggtcgagttctggaccgaccggctcgggttctcccgggacttcgtggaggacgacttcgccggtgtggtccgggacgacgtgaccctgttcatcagcgcggtccaggaccaggtggtgccggacaacaccctggcctgggtgtgggtgcgcggcctggacgagctgtacgccgagtggtcggaggtcgtgtccacgaacttccgggacgcctccgggccggccatgaccgagatcggcgagcagccgtgggggcgggagttcgccctgcgcgacccggccggcaactgcgtgcacttcgtggccgaggagcaggactgacacgtgctacgagatttcgattccaccgccgccttctatgaaaggttgggcttcggaatcgttttccgggacgccggctggatgatcctccagcgcggggatctcatgctggagttcttcgcccaccccaacttgtttattgcagcttataatggttacaaataaagcaatagcatcacaaatttcacaaataaagcatttttttcactgcattctagttgtggtttgtccaaactcatcaatgtatcttatcatgtctgtataccgtcgacctctagctagagcttggcgtaatcatggtcatagctgtttcctgtgtgaaattgttatccgctcacaattccacacaacatacgagccggaagcataaagtgtaaagcctggggtgcctaatgagtgagctaactcacattaattgcgttgcgctcactgcccgctttccagtcgggaaacctgtcgtgccagctgcattaatgaatcggccaacgcgcggggagaggcggtttgcgtattgggcgctcttccgcttcctcgctcactgactcgctgcgctcggtcgttcggctgcggcgagcggtatcagctcactcaaaggcggtaatacggttatccacagaatcaggggataacgcaggaaagaacatgtgagcaaaaggccagcaaaaggccaggaaccgtaaaaaggccgcgttgctggcgtttttccataggctccgcccccctgacgagcatcacaaaaatcgacgctcaagtcagaggtggcgaaacccgacaggactataaagataccaggcgtttccccctggaagctccctcgtgcgctctcctgttccgaccctgccgcttaccggatacctgtccgcctttctcccttcgggaagcgtggcgctttctcatagctcacgctgtaggtatctcagttcggtgtaggtcgttcgctccaagctgggctgtgtgcacgaaccccccgttcagcccgaccgctgcgccttatccggtaactatcgtcttgagtccaacccggtaagacacgacttatcgccactggcagcagccactggtaacaggattagcagagcgaggtatgtaggcggtgctacagagttcttgaagtggtggcctaactacggctacactagaagaacagtatttggtatctgcgctctgctgaagccagttaccttcggaaaaagagttggtagctcttgatccggcaaacaaaccaccgctggtagcggtggtttttttgtttgcaagcagcagattacgcgcagaaaaaaaggatctcaagaagatcctttgatcttttctacggggtctgacgctcagtggaacgaaaactcacgttaagggattttggtcatgagattatcaaaaaggatcttcacctagatccttttaaattaaaaatgaagttttaaatcaatctaaagtatatatgagtaaacttggtctgacagttaccaatgcttaatcagtgaggcacctatctcagcgatctgtctatttcgttcatccatagttgcctgactccccgtcgtgtagataactacgatacgggagggcttaccatctggccccagtgctgcaatgataccgcgagacccacgctcaccggctccagatttatcagcaataaaccagccagccggaagggccgagcgcagaagtggtcctgcaactttatccgcctccatccagtctattaattgttgccgggaagctagagtaagtagttcgccagttaatagtttgcgcaacgttgttgccattgctacaggcatcgtggtgtcacgctcgtcgtttggtatggcttcattcagctccggttcccaacgatcaaggcgagttacatgatcccccatgttgtgcaaaaaagcggttagctccttcggtcctccgatcgttgtcagaagtaagttggccgcagtgttatcactcatggttatggcagcactgcataattctcttactgtcatgccatccgtaagatgcttttctgtgactggtgagtactcaaccaagtcattctgagaatagtgtatgcggcgaccgagttgctcttgcccggcgtcaatacgggataataccgcgccacatagcagaactttaaaagtgctcatcattggaaaacgttcttcggggcgaaaactctcaaggatcttaccgctgttgagatccagttcgatgtaacccactcgtgcacccaactgatcttcagcatcttttactttcaccagcgtttctgggtgagcaaaaacaggaaggcaaaatgccgcaaaaaagggaataagggcgacacggaaatgttgaatactcatactcttcctttttcaatattattgaagcatttatcagggttattgtctcatgagcggatacatatttgaatgtatttagaaaaataaacaaataggggttccgcgcacatttccccgaaaagtgccacctgacgtcgacggatcgggagatctcccgatcccctatggtgcactctcagtacaatctgctctgatgccgcatagttaagccagtatctgctccctgcttgtgtgttggaggtcgctgagtagtgcgcgagcaaaatttaagctacaacaaggcaaggcttgaccgacaattgcatgaagaatctgcttagggttaggcgttttgcgctgcttcgcgatgtacgggccagatatacgcgttgacattgattattgactagttattaatagtaatcaattacggggtcattagttcatagcccatatatggagttccgcgttacataacttacggtaaatggcccgcctggctgaccgcccaacgacccccgcccattgacgtcaataatgacgtatgttcccatagtaacgccaatagggactttccattgacgtcaatgggtggagtatttacggtaaactgcccacttggcagtacatcaagtgtatcatatgccaagtacgccccctattgacgtcaatgacggtaaatggcccgcctggcattatgcccagtacatgaccttatgggactttcctacttggcagtacatctacgtattagtcatcgctattaccatggtgatgcggttttggcagtacatcaatgggcgtggatagcggtttgactcacggggatttccaagtctccaccccattgacgtcaatgggagtttgttttggcaccaaaatcaacgggactttccaaaatgtcgtaacaactccgccccattgacgcaaatgggcggtaggcgtgtacggtgggaggtctatataagcagcgcgttttgcct

SEQ ID NO: 98 - DNA, 11449 bp, synthetic construct
  misc_feature 1..11449: note = Synthetic: FG12W-UbC-kozak-IgKVIII-RMP5-miR362A-Fc-DSS6
  source 1..11449: mol_type = other DNA
gtactgggtctctctggttagaccagatctgagcctgggagctctctggctaactagggaacccactgcttaagcctcaataaagcttgccttgagtgcttcaagtagtgtgtgcccgtctgttgtgtgactctggtaactagagatccctcagacccttttagtcagtgtggaaaatctctagcagtggcgcccgaacagggacttgaaagcgaaagggaaaccagaggagctctctcgacgcaggactcggcttgctgaagcgcgcacggcaagaggcgaggggcggcgactggtgagtacgccaaaaattttgactagcggaggctagaaggagagagatgggtgcgagagcgtcagtattaagcgggggagaattagatcgcgatgggaaaaaattcggttaaggccagggggaaagaaaaaatataaattaaaacatatagtatgggcaagcagggagctagaacgattcgcagttaatcctggcctgttagaaacatcagaaggctgtagacaaatactgggacagctacaaccatcccttcagacaggatcagaagaacttagatcattatataatacagtagcaaccctctattgtgtgcatcaaaggatagagataaaagacaccaaggaagctttagacaagatagaggaagagcaaaacaaaagtaagaccaccgcacagcaagcggccgctgatcttcagacctggaggaggagatatgagggacaattggagaagtgaattatataaatataaagtagtaaaaattgaaccattaggagtagcacccaccaaggcaaagagaagagtggtgcagagagaaaaaagagcagtgggaataggagctttgttccttgggttcttgggagcagcaggaagcactatgggcgcagcgtcaatgacgctgacggtacaggccagacaattattgtctggtatagtgcagcagcagaacaatttgctgagggctattgaggcgcaacagcatctgttgcaactcacagtctggggcatcaagcagctccaggcaagaatcctggctgtggaaagatacctaaaggatcaacagctcctggggatttggggttgctctggaaaactcatttgcaccactgctgtgccttggaatgctagttggagtaataaatctctggaacagatttggaatcacacgacctggatggagtgggacagagaaattaacaattacacaagcttaatacactccttaattgaagaatcgcaaaaccagcaagaaaagaatgaacaagaattattggaattagataaatgggcaagtttgtggaattggtttaacataacaaattggctgtggtatataaaattattcataatgatagtaggaggcttggtaggtttaagaatagtttttgctgtactttctatagtgaatagagttaggcagggatattcaccattatcgtttcagacccacctcccaaccccgaggggacccgacaggcccgaaggaatagaagaagaaggtggagagagagacagagacagatccattcgattagtgaacggatcggcactgcgtgcgccaattctgcagacaaatggcagtattcatccacaattttaaaagaaaaggggggattggggggtacagtgcaggggaaagaatagtagacataatagcaacagacatacaaactaaagaattacaaaaacaaattacaaaaattcaaaattttcgggtttattacagggacagcagagatccagtttggttaattaacccacccaagatctggcctccgcgccgggttttggcgcctcccgcgggcgcccccctcctcacggcgagcgctgccacgtcagacgaagggcgcagcgagcgtcctgatccttccgcccggacgctcaggacagcggcccgctgctcataagactcggccttagaaccccagtatcagcagaaggacattttaggacgggacttgggtgactctagggcactggttttctttccagagagcggaacaggcgaggaaaagtagtcccttctcggcgattctgcggagggatctccgtggggcggtgaacgccgatgattatataaggacgcgccgggtgtggcacagctagttccgtcgcagccgggatttgggtcgcggttcttgtttgtggatcgctgtgatcgtcacttggtgagtagcgggctgctgggctggccggggctttcgtggccgccgggccgctcggtgggacggaagcgtgtggagagaccgccaagggctgtagtctgggtccgcgagcaaggttgccctgaactgggggttggggggagcgcagcaaaatggcggctgttcccgagtcttgaatggaagacgcttgtgaggcgggctgtgaggtcgttgaaacaaggtggggggcatggtgggcggcaagaacccaaggtcttgaggccttcgctaatgcgggaaagctcttattcgggtgagatgggctggggcaccatctggggaccctgacgtgaagtttgtcactgactggagaactcggtttgtcgtctgttgcgggggcggcagttatggcggtgccgttgggcagtgcacccgtacctttgggagcgcgcgccctcgtcgtgtcgtgacgtcacccgttctgttggcttataatgcagggtggggccacctgccggtaggtgtgcggtaggcttttctccgtcgcaggacgcagggttcgggcctagggtaggctctcctgaatcgacaggcgccggacctctggtgaggggagggataagtgaggcgtcagtttctttggtcggttttatgtacctatcttcttaagtagctgaagctccggttttgaactatgcgctcggggttggcgagtgtgttttgtgaagttttttaggcaccttttgaaatgtaatcatttgggtcaatatgtaattttcagtgttagactagtaaattgtccgctaaattctggccgtttttggcttttttgttagacgctagcgccaccatggatatgcgcgtacccgctcaacttctgggtttgttgctgctttggctcaggggagcccgctgtgccgcgcttgtccctgaaaaggagaaggaccccaaatattggagagaccaggctcaggaaaccctcaagtacgctcttgaactgcaaaagcttaatactaacgtggctaaaaacgtgataatgttcttgggggacggaatgggggtttcaaccgttaccgcggccagaatcttgaaagggcagctgcaccataacccaggcgaagaaacgaggctggagatggacaaatttccattcgtggcgctttctaagacctacaacactaacgcccaggtccctgactcagctggtacggccactgcctacctttgtggagtgaaggcaaatgaggggactgttggtgtttccgcagctactgagagatctcggtgtaatacgactcaaggtaatgaagttacatccatactccgatgggcaaaagacgcgggcaaatctgttgggattgttacaactactagggtgaaccatgcgacaccctctgcagcttatgcgcacagtgccgaccgagactggtattcagataatgagatgccacccgaggcccttagccagggctgcaaggacatagcctatcaattgatgcacaatatcagagacatagacgttataatgggtggtggtcgcaagtacatgtaccccaaaaacaaaaccgacgtagagtatgaatccgatgaaaaagctaggggcaccagactcgacggacttgatctggttgatacatggaagagcttcaagcccagatacaagcattcacatttcatctggaacaggaccgaacttctcacattggacccccacaatgttgactatctcctcggtttgtttgaaccaggggatatgcagtatgagctcaatcggaacaacgtcactgaccccagtttgagtgaaatggtcgttgttgcaatacaaattttgaggaaaaatccaaaggggtttttcttgttggtagagggcggacggatagatcacgggcaccacgaaggcaaagcaaaacaggccctgcacgaagccgttgaaatggatcgcgctatcggtcaagccggctccctgacgagtagtgaagataccttgaccgtcgtcactgcggatcatagccacgtttttacctttgggggatacacccccaggggcaactcaatttttggacttgcaccgatgctcagcgacacagataaaaagccttttactgcgattctgtatggcaacggccctggatacaaagtagtagggggtgaaagggaaaacgtcagcatggtggactatgcacacaataattatcaggcgcagtccgctgttccgctgcggcatgagactcacgggggagaggacgttgctgtcttttccaagggaccaatggctcatcttctccatggagtccatgagcaaaattatgtccctcatgtcatggcatacgctgcatgtataggagcaaatctcgggcactgtgcaccggcgtcctccctcaaagacaaaacacacacttgtccaccttgcccggcacctgaacttctgggcggcccgagcgtttttttgttccctcctaaacctaaggacacgctcatgatcagccgcacgccagaggttacctgtgtagtggtggatgtcagccacgaggatccggaagtaaaattcaactggtatgtagatggggtggaggttcacaatgccaaaaccaagccacgagaggaacagtacaatagtacttaccgggtcgtgtctgtattgaccgtcctgcatcaggattggttgaacgggaaagaatataagtgcaaggtgagcaacaaagcacttccggccccaatagagaaaacaattagtaaagcaaaaggacaaccacgggaaccgcaagtttatacactgccgccctctcgagacgagctgaccaaaaatcaggttagccttacatgtttggtcaaggggttctacccgagtgatattgcagtggaatgggaatccaacggtcaaccagaaaataactacaaaactactccgccggtgttggattcagacggctctttctttctgtatagcaaactcactgttgacaagtcaagatggcagcagggcaatgtatttagctgtagtgttatgcacgaagctcttcataaccactacacacaaaagtcactttctctttccccaggaaaagacatcgattccagcgacagttcagacagctctgacagctccgattcctccgactcaagttgagaattcgatatcaagcttatcgataatcaacctctggattacaaaatttgtgaaagattgactggtattcttaactatgttgctccttttacgctatgtggatacgctgctttaatgcctttgtatcatgctattgcttcccgtatggctttcattttctcctccttgtataaatcctggttgctgtctctttatgaggagttgtggcccgttgtcaggcaacgtggcgtggtgtgcactgtgtttgctgacgcaacccccactggttggggcattgccaccacctgtcagctcctttccgggactttcgctttccccctccctattgccacggcggaactcatcgccgcctgccttgcccgctgctggacaggggctcggctgttgggcactgacaattccgtggtgttgtcggggaaatcatcgtcctttccttggctgctcgcctgtgttgccacctggattctgcgcgggacgtccttctgctacgtcccttcggccctcaatccagcggaccttccttcccgcggcctgctgccggctctgcggcctcttccgcgtcttcgccttcgccctcagacgagtcggatctccctttgggccgcctccccgcatcgataccgtcgacctcgagacctagaaaaacatggagcaatcacaagtagcaatacagcagctaccaatgctgattgtgcctggctagaagcacaagaggaggaggaggtgggttttccagtcacacctcaggtacctttaagaccaatgacttacaaggcagctgtagatcttagccactttttaaaagaaaaggggggactggaagggctaattcactcccaacgaagacaagatatccttgatctgtggatctaccacacacaaggctacttccctgattggcagaactacacaccagggccagggatcagatatccactgacctttggatggtgctacaagctagtaccagttgagcaagagaaggtagaagaagccaatgaaggagagaacacccgcttgttacaccctgtgagcctgcatgggatggatgacccggagagagaagtattagagtggaggtttgacagccgcctagcatttcatcacatggcccgagagctgcatccggactgtactgggtctctctggttagaccagatctgagcctgggagctctctggctaactagggaacccactgcttaagcctcaataaagcttgccttgagtgcttcaagtagtgtgtgcccgtctgttgtgtgactctggtaactagagatccctcagacccttttagtcagtgtggaaaatctctagcagggcccgtttaaacccgctgatcagcctcgactgtgccttctagttgccagccatctgttgtttgcccctcccccgtgccttccttgaccctggaaggtgccactcccactgtcctttcctaataaaatgaggaaattgcatcgcattgtctgagtaggtgtcattctattctggggggtggggtggggcaggacagcaagggggaggattgggaagacaatagcaggcatgctggggatgcggtgggctctatggcttctgaggcggaaagaaccagctggggctctagggggtatccccacgcgccctgtagcggcgcattaagcgcggcgggtgtggtggttacgcgcagcgtgaccgctacacttgccagcgccctagcgcccgctcctttcgctttcttcccttcctttctcgccacgttcgccggctttccccgtcaagctctaaatcgggggctccctttagggttccgatttagtgctttacggcacctcgaccccaaaaaacttgattagggtgatggttcacgtagtgggccatcgccctgatagacggtttttcgccctttgacgttggagtccacgttctttaatagtggactcttgttccaaactggaacaacactcaaccctatctcggtctattcttttgatttataagggattttgccgatttcggcctattggttaaaaaatgagctgatttaacaaaaatttaacgcgaattaattctgtggaatgtgtgtcagttagggtgtggaaagtccccaggctccccagcaggcagaagtatgcaaagcatgcatctcaattagtcagcaaccaggtgtggaaagtccccaggctccccagcaggcagaagtatgcaaagcatgcatctcaattagtcagcaaccatagtcccgcccctaactccgcccatcccgcccctaactccgcccagttccgcccattctccgccccatggctgactaattttttttatttatgcagaggccgaggccgcctctgcctctgagctattccagaagtagtgaggaggcttttttggaggcctaggcttttgcaaaaagctcccgggagcttgtatatccattttcggatctgatcagcacgtgttgacaattaatcatcggcatagtatatcggcatagtataatacgacaaggtgaggaactaaaccatggccaagttgaccagtgccgttccggtgctcaccgcgcgcgacgtcgccggagcggtcgagttctggaccgaccggctcgggttctcccgggacttcgtggaggacgacttcgccggtgtggtccgggacgacgtgaccctgttcatcagcgcggtccaggaccaggtggtgccggacaacaccctggcctgggtgtgggtgcgcggcctggacgagctgtacgccgagtggtcggaggtcgtgtccacgaacttccgggacgcctccgggccggccatgaccgagatcggcgagcagccgtgggggcgggagttcgccctgcgcgacccggccggcaactgcgtgcacttcgtggccgaggagcaggactgacacgtgctacgagatttcgattccaccgccgccttctatgaaaggttgggcttcggaatcgttttccgggacgccggctggatgatcctccagcgcggggatctcatgctggagttcttcgcccaccccaacttgtttattgcagcttataatggttacaaataaagcaatagcatcacaaatttcacaaataaagcatttttttcactgcattctagttgtggtttgtccaaactcatcaatgtatcttatcatgtctgtataccgtcgacctctagctagagcttggcgtaatcatggtcatagctgtttcctgtgtgaaattgttatccgctcacaattccacacaacatacgagccggaagcataaagtgtaaagcctggggtgcctaatgagtgagctaactcacattaattgcgttgcgctcactgcccgctttccagtcgggaaacctgtcgtgccagctgcattaatgaatcggccaacgcgcggggagaggcggtttgcgtattgggcgctcttccgcttcctcgctcactgactcgctgcgctcggtcgttcggctgcggcgagcggtatcagctcactcaaaggcggtaatacggttatccacagaatcaggggataacgcaggaaagaacatgtgagcaaaaggccagcaaaaggccaggaaccgtaaaaaggccgcgttgctggcgtttttccataggctccgcccccctgacgagcatcacaaaaatcgacgctcaagtcagaggtggcgaaacccgacaggactataaagataccaggcgtttccccctggaagctccctcgtgcgctctcctgttccgaccctgccgcttaccggatacctgtccgcctttctcccttcgggaagcgtggcgctttctcatagctcacgctgtaggtatctcagttcggtgtaggtcgttcgctccaagctgggctgtgtgcacgaaccccccgttcagcccgaccgctgcgccttatccggtaactatcgtcttgagtccaacccggtaagacacgacttatcgccactggcagcagccactggtaacaggattagcagagcgaggtatgtaggcggtgctacagagttcttgaagtggtggcctaactacggctacactagaagaacagtatttggtatctgcgctctgctgaagccagttaccttcggaaaaagagttggtagctcttgatccggcaaacaaaccaccgctggtagcggtggtttttttgtttgcaagcagcagattacgcgcagaaaaaaaggatctcaagaagatcctttgatcttttctacggggtctgacgctcagtggaacgaaaactcacgttaagggattttggtcatgagattatcaaaaaggatcttcacctagatccttttaaattaaaaatgaagttttaaatcaatctaaagtatatatgagtaaacttggtctgacagttaccaatgcttaatcagtgaggcacctatctcagcgatctgtctatttcgttcatccatagttgcctgactccccgtcgtgtagataactacgatacgggagggcttaccatctggccccagtgctgcaatgataccgcgagacccacgctcaccggctccagatttatcagcaataaaccagccagccggaagggccgagcgcagaagtggtcctgcaactttatccgcctccatccagtctattaattgttgccgggaagctagagtaagtagttcgccagttaatagtttgcgcaacgttgttgccattgctacaggcatcgtggtgtcacgctcgtcgtttggtatggcttcattcagctccggttcccaacgatcaaggcgagttacatgatcccccatgttgtgcaaaaaagcggttagctccttcggtcctccgatcgttgtcagaagtaagttggccgcagtgttatcactcatggttatggcagcactgcataattctcttactgtcatgccatccgtaagatgcttttctgtgactggtgagtactcaaccaagtcattctgagaatagtgtatgcggcgaccgagttgctcttgcccggcgtcaatacgggataataccgcgccacatagcagaactttaaaagtgctcatcattggaaaacgttcttcggggcgaaaactctcaaggatcttaccgctgttgagatccagttcgatgtaacccactcgtgcacccaactgatcttcagcatcttttactttcaccagcgtttctgggtgagcaaaaacaggaaggcaaaatgccgcaaaaaagggaataagggcgacacggaaatgttgaatactcatactcttcctttttcaatattattgaagcatttatcagggttattgtctcatgagcggatacatatttgaatgtatttagaaaaataaacaaataggggttccgcgcacatttccccgaaaagtgccacctgacgtcgacggatcgggagatctcccgatcccctatggtgcactctcagtacaatctgctctgatgccgcatagttaagccagtatctgctccctgcttgtgtgttggaggtcgctgagtagtgcgcgagcaaaatttaagctacaacaaggcaaggcttgaccgacaattgcatgaagaatctgcttagggttaggcgttttgcgctgcttcgcgatgtacgggccagatatacgcgttgacattgattattgactagttattaatagtaatcaattacggggtcattagttcatagcccatatatggagttccgcgttacataacttacggtaaatggcccgcctggctgaccgcccaacgacccccgcccattgacgtcaataatgacgtatgttcccatagtaacgccaatagggactttccattgacgtcaatgggtggagtatttacggtaaactgcccacttggcagtacatcaagtgtatcatatgccaagtacgccccctattgacgtcaatgacggtaaatggcccgcctggcattatgcccagtacatgaccttatgggactttcctacttggcagtacatctacgtattagtcatcgctattaccatggtgatgcggttttggcagtacatcaatgggcgtggatagcggtttgactcacggggatttccaagtctccaccccattgacgtcaatgggagtttgttttggcaccaaaatcaacgggactttccaaaatgtcgtaacaactccgccccattgacgcaaatgggcggtaggcgtgtacggtgggaggtctatataagcagcgcgttttgcct

SEQ ID NO: 99 - DNA, 211 bp, Homo sapiens
  misc_feature 1..211: note = EFS promoter
  source 1..211: mol_type = genomic DNA
gggcagagcgcacatcgcccacagtccccgagaagttggggggaggggtcggcaattgaaccggtgcctagagaaggtggcgcggggtaaactgggaaagtgatgtcgtgtactggctccgcctttttcccgagggtgggggagaaccgtatataagtgcagtagtcgccgtgaacgttcttttcgcaacgggtttgccgccagaacacag

SEQ ID NO: 100 - DNA, 1178 bp, synthetic construct
  misc_feature 1..1178: note = Synthetic: EF1-alpha- (with intron) promoter
  source 1..1178: mol_type = other DNA
ggctccggtgcccgtcagtgggcagagcgcacatcgcccacagtccccgagaagttggggggaggggtcggcaattgaaccggtgcctagagaaggtggcgcggggtaaactgggaaagtgatgtcgtgtactggctccgcctttttcccgagggtgggggagaaccgtatataagtgcagtagtcgccgtgaacgttctttttcgcaacgggtttgccgccagaacacaggtaagtgccgtgtgtggttcccgcgggcctggcctctttacgggttatggcccttgcgtgccttgaattacttccactggctgcagtacgtgattcttgatcccgagcttcgggttggaagtgggtgggagagttcgaggccttgcgcttaaggagccccttcgcctcgtgcttgagttgaggcctggcctgggcgctggggccgccgcgtgcgaatctggtggcaccttcgcgcctgtctcgctgctttcgataagtctctagccatttaaaatttttgatgacctgctgcgacgctttttttctggcaagatagtcttgtaaatgcgggccaagatctgcacactggtatttcggtttttggggccgcgggcggcgacggggcccgtgcgtcccagcgcacatgttcggcgaggcggggcctgcgagcgcggccaccgagaatcggacgggggtagtctcaagctggccggcctgctctggtgcctggcctcgcgccgccgtgtatcgccccgccctgggcggcaaggctggcccggtcggcaccagttgcgtgagcggaaagatggccgcttcccggccctgctgcagggagctcaaaatggaggacgcggcgctcgggagagcgggcgggtgagtcacccacacaaaggaaaagggcctttccgtcctcagccgtcgcttcatgtgactccacggagtaccgggcgccgtccaggcacctcgattagttctcgagcttttggagtacgtcgtctttaggttggggggaggggttttatgcgatggagtttccccacactgagtgggtggagactgaagttaggccagcttggcacttgatgtaattctccttggaatttgccctttttgagtttggatcttggttcattctcaagcctcagacagtggttcaaagtttttttcttccatttcaggtgtcgtga

SEQ ID NO: 101 - DNA, 1212 bp, Homo sapiens
  misc_feature 1..1212: note = UbC promoter
  source 1..1212: mol_type = genomic DNA
ggcctccgcgccgggttttggcgcctcccgcgggcgcccccctcctcacggcgagcgctgccacgtcagacgaagggcgcagcgagcgtcctgatccttccgcccggacgctcaggacagcggcccgctgctcataagactcggccttagaaccccagtatcagcagaaggacattttaggacgggacttgggtgactctagggcactggttttctttccagagagcggaacaggcgaggaaaagtagtcccttctcggcgattctgcggagggatctccgtggggcggtgaacgccgatgattatataaggacgcgccgggtgtggcacagctagttccgtcgcagccgggatttgggtcgcggttcttgtttgtggatcgctgtgatcgtcacttggtgagtagcgggctgctgggctggccggggctttcgtggccgccgggccgctcggtgggacggaagcgtgtggagagaccgccaagggctgtagtctgggtccgcgagcaaggttgccctgaactgggggttggggggagcgcagcaaaatggcggctgttcccgagtcttgaatggaagacgcttgtgaggcgggctgtgaggtcgttgaaacaaggtggggggcatggtgggcggcaagaacccaaggtcttgaggccttcgctaatgcgggaaagctcttattcgggtgagatgggctggggcaccatctggggaccctgacgtgaagtttgtcactgactggagaactcggtttgtcgtctgttgcgggggcggcagttatggcggtgccgttgggcagtgcacccgtacctttgggagcgcgcgccctcgtcgtgtcgtgacgtcacccgttctgttggcttataatgcagggtggggccacctgccggtaggtgtgcggtaggcttttctccgtcgcaggacgcagggttcgggcctagggtaggctctcctgaatcgacaggcgccggacctctggtgaggggagggataagtgaggcgtcagtttctttggtcggttttatgtacctatcttcttaagtagctgaagctccggttttgaactatgcgctcggggttggcgagtgtgttttgtgaagttttttaggcaccttttgaaatgtaatcatttgggtcaatatgtaattttcagtgttagactagtaaattgtccgctaaattctggccgtttttggcttttttgttagac

SEQ ID NO: 102 - DNA, 234 bp, Human immunodeficiency virus type 1
  misc_feature 1..234: note = rre
  source 1..234: mol_type = genomic DNA
aggagctttgttccttgggttcttgggagcagcaggaagcactatgggcgcagcgtcaatgacgctgacggtacaggccagacaattattgtctggtatagtgcagcagcagaacaatttgctgagggctattgaggcgcaacagcatctgttgcaactcacagtctggggcatcaagcagctccaggcaagaatcctggctgtggaaagatacctaaaggatcaacagctcct

SEQ ID NO: 103 - DNA, 118 bp, Human immunodeficiency virus type 1
  misc_feature 1..118: note = cPPT/CTS
  source 1..118: mol_type = genomic DNA
ttttaaaagaaaaggggggattggggggtacagtgcaggggaaagaatagtagacataatagcaacagacatacaaactaaagaattacaaaaacaaattacaaaaattcaaaatttt

SEQ ID NO: 104 - DNA, 225 bp, Bos taurus
  misc_feature 1..225: note = bGH-poly(A) signal
  source 1..225: mol_type = genomic DNA
ctgtgccttctagttgccagccatctgttgtttgcccctcccccgtgccttccttgaccctggaaggtgccactcccactgtcctttcctaataaaatgaggaaattgcatcgcattgtctgagtaggtgtcattctattctggggggtggggtggggcaggacagcaagggggaggattgggaagacaatagcaggcatgctggggatgcggtgggctctatgg

SEQ ID NO: 105 - protein, 734 aa, synthetic construct
  REGION 1..734: note = Synthetic: amino acid sequence of RMP-005Fc without signal peptide (sTNSALP-(LK)-Fc domain-(DI)-(DSS)6);
LVPEKEKDPKYWRDQAQETLKYALELQKLNTNVAKNVIMFLGDGMGVSTVTAARILKGQLHHNPGEETRLEMDKFPFVALSKTYNTNAQVPDSAGTATAYLCGVKANEGTVGVSAATERSRCNTTQGNEVTSILRWAKDAGKSVGIVTTTRVNHATPSAAYAHSADRDWYSDNEMPPEALSQGCKDIAYQLMHNIRDIDVIMGGGRKYMYPKNKTDVEYESDEKARGTRLDGLDLVDTWKSFKPRYKHSHFIWNRTELLTLDPHNVDYLLGLFEPGDMQYELNRNNVTDPSLSEMVVVAIQILRKNPKGFFLLVEGGRIDHGHHEGKAKQALHEAVEMDRAIGQAGSLTSSEDTLTVVTADHSHVFTFGGYTPRGNSIFGLAPMLSDTDKKPFTAILYGNGPGYKVVGGERENVSMVDYAHNNYQAQSAVPLRHETHGGEDVAVFSKGPMAHLLHGVHEQNYVPHVMAYAACIGANLGHCAPASSLKDKTHTCPPCPAPELLGGPSVFLFPPKPKDTLMISRTPEVTCVVVDVSHEDPEVKFNWYVDGVEVHNAKTKPREEQYNSTYRVVSVLTVLHQDWLNGKEYKCKVSNKALPAPIEKTISKAKGQPREPQVYTLPPSRDELTKNQVSLTCLVKGFYPSDIAVEWESNGQPENNYKTTPPVLDSDGSFFLYSKLTVDKSRWQQGNVFSCSVMHEALHNHYTQKSLSLSPGKDIDSSDSSDSSDSSDSSDSS

SEQ ID NO: 106 - DNA, 1575 bp, synthetic construct
  misc_feature 1..1575: note = Synthetic: isolated nucleotide sequences of RMP-001, RMP-002, RMP-003, RMP-004, RMP-005, RMP-006, RMP-007, RMP-008, and RMP-000
  source 1..1575: mol_type = other DNA
atgatttcacccttcctggttttggcaattggaacctgccttaccaactcccttgtccctgaaaaggagaaggaccccaaatattggagagaccaggctcaggaaaccctcaagtacgctcttgaactgcaaaagcttaatactaacgtggctaaaaacgtgataatgttcttgggggacggaatgggggtttcaaccgttaccgcggccagaatcttgaaagggcagctgcaccataacccaggcgaagaaacgaggctggagatggacaaatttccattcgtggcgctttctaagacctacaacactaacgcccaggtccctgactcagctggtacggccactgcctacctttgtggagtgaaggcaaatgaggggactgttggtgtttccgcagctactgagagatctcggtgtaatacgactcaaggtaatgaagttacatccatactccgatgggcaaaagacgcgggcaaatctgttgggattgttacaactactagggtgaaccatgcgacaccctctgcagcttatgcgcacagtgccgaccgagactggtattcagataatgagatgccacccgaggcccttagccagggctgcaaggacatagcctatcaattgatgcacaatatcagagacatagacgttataatgggtggtggtcgcaagtacatgtaccccaaaaacaaaaccgacgtagagtatgaatccgatgaaaaagctaggggcaccagactcgacggacttgatctggttgatacatggaaatcctttaaacctcggtataagcattcacatttcatctggaacaggaccgaacttctcacattggacccccacaatgttgactatctcctcggtttgtttgaaccaggggatatgcagtatgagctcaatcggaacaacgtcactgaccccagtttgagtgaaatggtcgttgttgcaatacaaattttgaggaaaaatccaaaggggtttttcttgttggtagagggcggacggatagatcacgggcaccacgaaggcaaagcaaaacaggccctgcacgaagccgttgaaatggatcgcgctatcggtcaagccggctccctgacgagtagtgaagataccttgaccgtcgtcactgcggatcatagccacgtttttacctttgggggatacacccccaggggcaactcaatttttggacttgcaccgatgctcagcgacacagataaaaagccttttactgcgattctgtatggcaacggccctggatacaaagtagtagggggtgaaagggaaaacgtcagcatggtggactatgcacacaataattatcaggcgcagtccgctgttccgctgcggcatgagactcacgggggagaggacgttgctgtcttttccaagggaccaatggctcatcttctccatggagtccatgagcaaaattatgtccctcatgtcatggcatacgctgcatgtataggagcaaatctcgggcactgtgcaccggcgtcctccgccggcagccttgcagctgggcctttgcttttggctctggcgctgtatcctctgagcgtgttgttctga

SEQ ID NO: 107 - DNA, 2232 bp, synthetic construct
  misc_feature 1..2232: note = Synthetic: RMP-001
  source 1..2232: mol_type = other DNA
atgataagtcccttcctcgtccttgccataggtacctgtctcaccaattcacttgtgccggagaaggaaaaagacccgaagtactggagggaccaggcccaggagacactcaagtatgctttggagctgcagaagctcaacaccaatgtcgccaaaaacgtgataatgttcctcggtgacggcatgggggtatctactgtaacggcggcacgcatcctgaaaggacagctgcaccacaatccaggcgaggagacccggctggaaatggacaagtttccattcgtggctttgtccaaaacttacaacaccaacgcacaagttcctgattctgccggtacggccactgcctacctctgtggcgtcaaggcaaatgaggggactgtgggggtatctgcggcaactgagaggagccgatgcaacacgacgcagggtaacgaggtgacatctatcctgaggtgggcaaaggacgcgggaaaaagcgtcggaatagtaacgaccacaagggtaaaccacgctacccctagcgcagcgtatgcacattcagccgatcgggattggtacagtgacaatgaaatgccgcctgaagctctgtcccagggttgcaaagatatcgcctatcagctgatgcataatatccgcgatattgacgtaatcatggggggtggacgaaaatatatgtacccaaaaaataaaacagatgtagaatatgaatctgatgagaaggcccggggtacaaggcttgatggtctcgatcttgtcgacacgtggaaatcattcaaacctcggtataaacacagccattttatctggaataggactgaattgcttacgcttgatccacacaacgtagactatttgctgggcctttttgagccgggagatatgcagtacgaacttaaccggaacaatgtgactgacccttctcttagcgagatggtggtagtggcgattcagatactcagaaaaaatcccaagggtttttttctcctggtcgagggcggaagaatcgatcatggacatcacgaaggaaaagcgaagcaagcacttcatgaagccgtagagatggatagggcaataggtcaggcaggctcacttacgtcaagtgaagatacccttacggtggtgacagctgaccacagccacgtctttactttcggcggctataccccccgaggcaattcaatctttgggttggcgcccatgctttcagatactgataagaaaccttttacagccatcttgtatggtaatgggcctgggtataaggtagttggtggtgagagggagaatgtatcaatggtcgattacgcacataataactaccaagctcagtcagcagtacctctgaggcatgaaacacacggcggagaggacgtagcagtattttcaaaaggcccaatggcccatctgctgcatggggtacatgagcaaaattatgtgccccatgtgatggcatatgcagcctgcatcggagcaaatctcgggcactgtgctcccgcctcaagtctcaaagacaaaacacacacttgtccaccttgcccggcacctgaacttctgggcggcccgagcgtttttttgttccctcctaaacctaaggacacgctcatgatcagccgcacgccagaggttacctgtgtagtggtggatgtcagccacgaggatccggaagtaaaattcaactggtatgtagatggggtggaggttcacaatgccaaaaccaagccacgagaggaacagtacaatagtacttaccgggtcgtgtctgtattgaccgtcctgcatcaggattggttgaacgggaaagaatataagtgcaaggtgagcaacaaagcacttccggccccaatagagaaaacaattagtaaagcaaaaggacaaccacgggaaccgcaagtttatacactgccgccctctcgagacgagctgaccaaaaatcaggttagccttacatgtttggtcaaggggttctacccgagtgatattgcagtggaatgggaatccaacggtcaaccagaaaataactacaaaactactccgccggtgttggattcagacggctctttctttctgtatagcaaactcactgttgacaagtcaagatggcagcagggcaatgtatttagctgtagtgttatgcacgaagctcttcataaccactacacacaaaagtcactttctctttccccaggaaaagacatcgatgacgatgacgatgatgacgacgacgattga

SEQ ID NO: 108 - DNA, 1509 bp, synthetic construct
  misc_feature 1..1509: note = Synthetic: RMP-002
  source 1..1509: mol_type = other DNA
atgatttcacccttcctggttttggcaattggaacctgccttaccaactcccttgtccctgaaaaggagaaggaccccaaatattggagagaccaggctcaggaaaccctcaagtacgctcttgaactgcaaaagcttaatactaacgtggctaaaaacgtgataatgttcttgggggacggaatgggggtttcaaccgttaccgcggccagaatcttgaaagggcagctgcaccataacccaggcgaagaaacgaggctggagatggacaaatttccattcgtggcgctttctaagacctacaacactaacgcccaggtccctgactcagctggtacggccactgcctacctttgtggagtgaaggcaaatgaggggactgttggtgtttccgcagctactgagagatctcggtgtaatacgactcaaggtaatgaagttacatccatactccgatgggcaaaagacgcgggcaaatctgttgggattgttacaactactagggtgaaccatgcgacaccctctgcagcttatgcgcacagtgccgaccgagactggtattcagataatgagatgccacccgaggcccttagccagggctgcaaggacatagcctatcaattgatgcacaatatcagagacatagacgttataatgggtggtggtcgcaagtacatgtaccccaaaaacaaaaccgacgtagagtatgaatccgatgaaaaagctaggggcaccagactcgacggacttgatctggttgatacatggaaatcctttaaacctcggtataagcattcacatttcatctggaacaggaccgaacttctcacattggacccccacaatgttgactatctcctcggtttgtttgaaccaggggatatgcagtatgagctcaatcggaacaacgtcactgaccccagtttgagtgaaatggtcgttgttgcaatacaaattttgaggaaaaatccaaaggggtttttcttgttggtagagggcggacggatagatcacgggcaccacgaaggcaaagcaaaacaggccctgcacgaagccgttgaaatggatcgcgctatcggtcaagccggctccctgacgagtagtgaagataccttgaccgtcgtcactgcggatcatagccacgtttttacctttgggggatacacccccaggggcaactcaatttttggacttgcaccgatgctcagcgacacagataaaaagccttttactgcgattctgtatggcaacggccctggatacaaagtagtagggggtgaaagggaaaacgtcagcatggtggactatgcacacaataattatcaggcgcagtccgctgttccgctgcggcatgagactcacgggggagaggacgttgctgtcttttccaagggaccaatggctcatcttctccatggagtccatgagcaaaattatgtccctcatgtcatggcatacgctgcatgtataggagcaaatctcgggcactgtgcaccggcgtcctcctga

SEQ ID NO: 109 - DNA, 1539 bp, synthetic construct
  misc_feature 1..1539: note = Synthetic: RMP-003
  source 1..1539: mol_type = other DNA
atgatttcacccttcctggttttggcaattggaacctgccttaccaactcccttgtccctgaaaaggagaaggaccccaaatattggagagaccaggctcaggaaaccctcaagtacgctcttgaactgcaaaagcttaatactaacgtggctaaaaacgtgataatgttcttgggggacggaatgggggtttcaaccgttaccgcggccagaatcttgaaagggcagctgcaccataacccaggcgaagaaacgaggctggagatggacaaatttccattcgtggcgctttctaagacctacaacactaacgcccaggtccctgactcagctggtacggccactgcctacctttgtggagtgaaggcaaatgaggggactgttggtgtttccgcagctactgagagatctcggtgtaatacgactcaaggtaatgaagttacatccatactccgatgggcaaaagacgcgggcaaatctgttgggattgttacaactactagggtgaaccatgcgacaccctctgcagcttatgcgcacagtgccgaccgagactggtattcagataatgagatgccacccgaggcccttagccagggctgcaaggacatagcctatcaattgatgcacaatatcagagacatagacgttataatgggtggtggtcgcaagtacatgtaccccaaaaacaaaaccgacgtagagtatgaatccgatgaaaaagctaggggcaccagactcgacggacttgatctggttgatacatggaaatcctttaaacctcggtataagcattcacatttcatctggaacaggaccgaacttctcacattggacccccacaatgttgactatctcctcggtttgtttgaaccaggggatatgcagtatgagctcaatcggaacaacgtcactgaccccagtttgagtgaaatggtcgttgttgcaatacaaattttgaggaaaaatccaaaggggtttttcttgttggtagagggcggacggatagatcacgggcaccacgaaggcaaagcaaaacaggccctgcacgaagccgttgaaatggatcgcgctatcggtcaagccggctccctgacgagtagtgaagataccttgaccgtcgtcactgcggatcatagccacgtttttacctttgggggatacacccccaggggcaactcaatttttggacttgcaccgatgctcagcgacacagataaaaagccttttactgcgattctgtatggcaacggccctggatacaaagtagtagggggtgaaagggaaaacgtcagcatggtggactatgcacacaataattatcaggcgcagtccgctgttccgctgcggcatgagactcacgggggagaggacgttgctgtcttttccaagggaccaatggctcatcttctccatggagtccatgagcaaaattatgtccctcatgtcatggcatacgctgcatgtataggagcaaatctcgggcactgtgcaccggcgtcctccgatgatgatgacgatgatgatgatgacgattga

SEQ ID NO: 110 - DNA, 1536 bp, synthetic construct
  misc_feature 1..1536: note = Synthetic: RMP-004
  source 1..1536: mol_type = other DNA
atgatttcacccttcctggttttggcaattggaacctgccttaccaactcccttgtccctgaaaaggagaaggaccccaaatattggagagaccaggctcaggaaaccctcaagtacgctcttgaactgcaaaagcttaatactaacgtggctaaaaacgtgataatgttcttgggggacggaatgggggtttcaaccgttaccgcggccagaatcttgaaagggcagctgcaccataacccaggcgaagaaacgaggctggagatggacaaatttccattcgtggcgctttctaagacctacaacactaacgcccaggtccctgactcagctggtacggccactgcctacctttgtggagtgaaggcaaatgaggggactgttggtgtttccgcagctactgagagatctcggtgtaatacgactcaaggtaatgaagttacatccatactccgatgggcaaaagacgcgggcaaatctgttgggattgttacaactactagggtgaaccatgcgacaccctctgcagcttatgcgcacagtgccgaccgagactggtattcagataatgagatgccacccgaggcccttagccagggctgcaaggacatagcctatcaattgatgcacaatatcagagacatagacgttataatgggtggtggtcgcaagtacatgtaccccaaaaacaaaaccgacgtagagtatgaatccgatgaaaaagctaggggcaccagactcgacggacttgatctggttgatacatggaaatcctttaaacctcggtataagcattcacatttcatctggaacaggaccgaacttctcacattggacccccacaatgttgactatctcctcggtttgtttgaaccaggggatatgcagtatgagctcaatcggaacaacgtcactgaccccagtttgagtgaaatggtcgttgttgcaatacaaattttgaggaaaaatccaaaggggtttttcttgttggtagagggcggacggatagatcacgggcaccacgaaggcaaagcaaaacaggccctgcacgaagccgttgaaatggatcgcgctatcggtcaagccggctccctgacgagtagtgaagataccttgaccgtcgtcactgcggatcatagccacgtttttacctttgggggatacacccccaggggcaactcaatttttggacttgcaccgatgctcagcgacacagataaaaagccttttactgcgattctgtatggcaacggccctggatacaaagtagtagggggtgaaagggaaaacgtcagcatggtggactatgcacacaataattatcaggcgcagtccgctgttccgctgcggcatgagactcacgggggagaggacgttgctgtcttttccaagggaccaatggctcatcttctccatggagtccatgagcaaaattatgtccctcatgtcatggcatacgctgcatgtataggagcaaatctcgggcactgtgcaccggcgtcctccgggggagggggatctggcggcggtgggtca

SEQ ID NO: 111 - DNA, 1560 bp, synthetic construct
  misc_feature 1..1560: note = Synthetic: RMP-005
  source 1..1560: mol_type = other DNA
atgatttcacccttcctggttttggcaattggaacctgccttaccaactcccttgtccctgaaaaggagaaggaccccaaatattggagagaccaggctcaggaaaccctcaagtacgctcttgaactgcaaaagcttaatactaacgtggctaaaaacgtgataatgttcttgggggacggaatgggggtttcaaccgttaccgcggccagaatcttgaaagggcagctgcaccataacccaggcgaagaaacgaggctggagatggacaaatttccattcgtggcgctttctaagacctacaacactaacgcccaggtccctgactcagctggtacggccactgcctacctttgtggagtgaaggcaaatgaggggactgttggtgtttccgcagctactgagagatctcggtgtaatacgactcaaggtaatgaagttacatccatactccgatgggcaaaagacgcgggcaaatctgttgggattgttacaactactagggtgaaccatgcgacaccctctgcagcttatgcgcacagtgccgaccgagactggtattcagataatgagatgccacccgaggcccttagccagggctgcaaggacatagcctatcaattgatgcacaatatcagagacatagacgttataatgggtggtggtcgcaagtacatgtaccccaaaaacaaaaccgacgtagagtatgaatccgatgaaaaagctaggggcaccagactcgacggacttgatctggttgatacatggaaatcctttaaacctcggtataagcattcacatttcatctggaacaggaccgaacttctcacattggacccccacaatgttgactatctcctcggtttgtttgaaccaggggatatgcagtatgagctcaatcggaacaacgtcactgaccccagtttgagtgaaatggtcgttgttgcaatacaaattttgaggaaaaatccaaaggggtttttcttgttggtagagggcggacggatagatcacgggcaccacgaaggcaaagcaaaacaggccctgcacgaagccgttgaaatggatcgcgctatcggtcaagccggctccctgacgagtagtgaagataccttgaccgtcgtcactgcggatcatagccacgtttttacctttgggggatacacccccaggggcaactcaatttttggacttgcaccgatgctcagcgacacagataaaaagccttttactgcgattctgtatggcaacggccctggatacaaagtagtagggggtgaaagggaaaacgtcagcatggtggactatgcacacaataattatcaggcgcagtccgctgttccgctgcggcatgagactcacgggggagaggacgttgctgtcttttccaagggaccaatggctcatcttctccatggagtccatgagcaaaattatgtccctcatgtcatggcatacgctgcatgtataggagcaaatctcgggcactgtgcaccggcgtcctccgattccagcgacagttcagacagctctgacagctccgattcctccgactcaagt

SEQ ID NO: 112 - DNA, 1593 bp, synthetic construct
  misc_feature 1..1593: note = Synthetic: RMP-006
  source 1..1593: mol_type = other DNA
atgatttcacccttcctggttttggcaattggaacctgccttaccaactcccttgtccctgaaaaggagaaggaccccaaatattggagagaccaggctcaggaaaccctcaagtacgctcttgaactgcaaaagcttaatactaacgtggctaaaaacgtgataatgttcttgggggacggaatgggggtttcaaccgttaccgcggccagaatcttgaaagggcagctgcaccataacccaggcgaagaaacgaggctggagatggacaaatttccattcgtggcgctttctaagacctacaacactaacgcccaggtccctgactcagctggtacggccactgcctacctttgtggagtgaaggcaaatgaggggactgttggtgtttccgcagctactgagagatctcggtgtaatacgactcaaggtaatgaagttacatccatactccgatgggcaaaagacgcgggcaaatctgttgggattgttacaactactagggtgaaccatgcgacaccctctgcagcttatgcgcacagtgccgaccgagactggtattcagataatgagatgccacccgaggcccttagccagggctgcaaggacatagcctatcaattgatgcacaatatcagagacatagacgttataatgggtggtggtcgcaagtacatgtaccccaaaaacaaaaccgacgtagagtatgaatccgatgaaaaagctaggggcaccagactcgacggacttgatctggttgatacatggaaatcctttaaacctcggtataagcattcacatttcatctggaacaggaccgaacttctcacattggacccccacaatgttgactatctcctcggtttgtttgaaccaggggatatgcagtatgagctcaatcggaacaacgtcactgaccccagtttgagtgaaatggtcgttgttgcaatacaaattttgaggaaaaatccaaaggggtttttcttgttggtagagggcggacggatagatcacgggcaccacgaaggcaaagcaaaacaggccctgcacgaagccgttgaaatggatcgcgctatcggtcaagccggctccctgacgagtagtgaagataccttgaccgtcgtcactgcggatcatagccacgtttttacctttgggggatacacccccaggggcaactcaatttttggacttgcaccgatgctcagcgacacagataaaaagccttttactgcgattctgtatggcaacggccctggatacaaagtagtagggggtgaaagggaaaacgtcagcatggtggactatgcacacaataattatcaggcgcagtccgctgttccgctgcggcatgagactcacgggggagaggacgttgctgtcttttccaagggaccaatggctcatcttctccatggagtccatgagcaaaattatgtccctcatgtcatggcatacgctgcatgtataggagcaaatctcgggcactgtgcaccggcgtcctccggagggggcggctcagggggtggaggctcagatagcagcgatagttctgactcatcagattctagtgactcctccgattcctcctga

SEQ ID NO: 113 - DNA, 1605 bp, synthetic construct
  misc_feature 1..1605: note = Synthetic: RMP-007
  source 1..1605: mol_type = other DNA
atgatttcacccttcctggttttggcaattggaacctgccttaccaactcccttgtccctgaaaaggagaaggaccccaaatattggagagaccaggctcaggaaaccctcaagtacgctcttgaactgcaaaagcttaatactaacgtggctaaaaacgtgataatgttcttgggggacggaatgggggtttcaaccgttaccgcggccagaatcttgaaagggcagctgcaccataacccaggcgaagaaacgaggctggagatggacaaatttccattcgtggcgctttctaagacctacaacactaacgcccaggtccctgactcagctggtacggccactgcctacctttgtggagtgaaggcaaatgaggggactgttggtgtttccgcagctactgagagatctcggtgtaatacgactcaaggtaatgaagttacatccatactccgatgggcaaaagacgcgggcaaatctgttgggattgttacaactactagggtgaaccatgcgacaccctctgcagcttatgcgcacagtgccgaccgagactggtattcagataatgagatgccacccgaggcccttagccagggctgcaaggacatagcctatcaattgatgcacaatatcagagacatagacgttataatgggtggtggtcgcaagtacatgtaccccaaaaacaaaaccgacgtagagtatgaatccgatgaaaaagctaggggcaccagactcgacggacttgatctggttgatacatggaaatcctttaaacctcggtataagcattcacatttcatctggaacaggaccgaacttctcacattggacccccacaatgttgactatctcctcggtttgtttgaaccaggggatatgcagtatgagctcaatcggaacaacgtcactgaccccagtttgagtgaaatggtcgttgttgcaatacaaattttgaggaaaaatccaaaggggtttttcttgttggtagagggcggacggatagatcacgggcaccacgaaggcaaagcaaaacaggccctgcacgaagccgttgaaatggatcgcgctatcggtcaagccggctccctgacgagtagtgaagataccttgaccgtcgtcactgcggatcatagccacgtttttacctttgggggatacacccccaggggcaactcaatttttggacttgcaccgatgctcagcgacacagataaaaagccttttactgcgattctgtatggcaacggccctggatacaaagtagtagggggtgaaagggaaaacgtcagcatggtggactatgcacacaataattatcaggcgcagtccgctgttccgctgcggcatgagactcacgggggagaggacgttgctgtcttttccaagggaccaatggctcatcttctccatggagtccatgagcaaaattatgtccctcatgtcatggcatacgctgcatgtataggagcaaatctcgggcactgtgcaccggcgtcctccgcgggatcattggctgctgatccggcggccactgcggctgccctttaccccctcagtgtccttttcgacgacgacgatgacgatgacgatgatgattga

SEQ ID NO: 114 - DNA, 1638 bp, synthetic construct
  misc_feature 1..1638: note = Synthetic: RMP-008
  source 1..1638: mol_type = other DNA
atgatttcacccttcctggttttggcaattggaacctgccttaccaactcccttgtccctgaaaaggagaaggaccccaaatattggagagaccaggctcaggaaaccctcaagtacgctcttgaactgcaaaagcttaatactaacgtggctaaaaacgtgataatgttcttgggggacggaatgggggtttcaaccgttaccgcggccagaatcttgaaagggcagctgcaccataacccaggcgaagaaacgaggctggagatggacaaatttccattcgtggcgctttctaagacctacaacactaacgcccaggtccctgactcagctggtacggccactgcctacctttgtggagtgaaggcaaatgaggggactgttggtgtttccgcagctactgagagatctcggtgtaatacgactcaaggtaatgaagttacatccatactccgatgggcaaaagacgcgggcaaatctgttgggattgttacaactactagggtgaaccatgcgacaccctctgcagcttatgcgcacagtgccgaccgagactggtattcagataatgagatgccacccgaggcccttagccagggctgcaaggacatagcctatcaattgatgcacaatatcagagacatagacgttataatgggtggtggtcgcaagtacatgtaccccaaaaacaaaaccgacgtagagtatgaatccgatgaaaaagctaggggcaccagactcgacggacttgatctggttgatacatggaaatcctttaaacctcggtataagcattcacatttcatctggaacaggaccgaacttctcacattggacccccacaatgttgactatctcctcggtttgtttgaaccaggggatatgcagtatgagctcaatcggaacaacgtcactgaccccagtttgagtgaaatggtcgttgttgcaatacaaattttgaggaaaaatccaaaggggtttttcttgttggtagagggcggacggatagatcacgggcaccacgaaggcaaagcaaaacaggccctgcacgaagccgttgaaatggatcgcgctatcggtcaagccggctccctgacgagtagtgaagataccttgaccgtcgtcactgcggatcatagccacgtttttacctttgggggatacacccccaggggcaactcaatttttggacttgcaccgatgctcagcgacacagataaaaagccttttactgcgattctgtatggcaacggccctggatacaaagtagtagggggtgaaagggaaaacgtcagcatggtggactatgcacacaataattatcaggcgcagtccgctgttccgctgcggcatgagactcacgggggagaggacgttgctgtcttttccaagggaccaatggctcatcttctccatggagtccatgagcaaaattatgtccctcatgtcatggcatacgctgcatgtataggagcaaatctcgggcactgtgcaccggcgtcctccgctggatctttggcggccgatcccgcagccacagcggcggctctttaccctttgtcagtactcttcgattcctcagactcatcagattcctccgattcatccgattccagtgactcctctgacagtagctga

SEQ ID NO: 115 - DNA, 2202 bp, synthetic construct
  misc_feature 1..2202: note = Synthetic: isolated nucleotide sequence of RMP-005Fc without signal peptide
  source 1..2202: mol_type = other DNA
cttgtccctgaaaaggagaaggaccccaaatattggagagaccaggctcaggaaaccctcaagtacgctcttgaactgcaaaagcttaatactaacgtggctaaaaacgtgataatgttcttgggggacggaatgggggtttcaaccgttaccgcggccagaatcttgaaagggcagctgcaccataacccaggcgaagaaacgaggctggagatggacaaatttccattcgtggcgctttctaagacctacaacactaacgcccaggtccctgactcagctggtacggccactgcctacctttgtggagtgaaggcaaatgaggggactgttggtgtttccgcagctactgagagatctcggtgtaatacgactcaaggtaatgaagttacatccatactccgatgggcaaaagacgcgggcaaatctgttgggattgttacaactactagggtgaaccatgcgacaccctctgcagcttatgcgcacagtgccgaccgagactggtattcagataatgagatgccacccgaggcccttagccagggctgcaaggacatagcctatcaattgatgcacaatatcagagacatagacgttataatgggtggtggtcgcaagtacatgtaccccaaaaacaaaaccgacgtagagtatgaatccgatgaaaaagctaggggcaccagactcgacggacttgatctggttgatacatggaagagcttcaagcccagatacaagcattcacatttcatctggaacaggaccgaacttctcacattggacccccacaatgttgactatctcctcggtttgtttgaaccaggggatatgcagtatgagctcaatcggaacaacgtcactgaccccagtttgagtgaaatggtcgttgttgcaatacaaattttgaggaaaaatccaaaggggtttttcttgttggtagagggcggacggatagatcacgggcaccacgaaggcaaagcaaaacaggccctgcacgaagccgttgaaatggatcgcgctatcggtcaagccggctccctgacgagtagtgaagataccttgaccgtcgtcactgcggatcatagccacgtttttacctttgggggatacacccccaggggcaactcaatttttggacttgcaccgatgctcagcgacacagataaaaagccttttactgcgattctgtatggcaacggccctggatacaaagtagtagggggtgaaagggaaaacgtcagcatggtggactatgcacacaataattatcaggcgcagtccgctgttccgctgcggcatgagactcacgggggagaggacgttgctgtcttttccaagggaccaatggctcatcttctccatggagtccatgagcaaaattatgtccctcatgtcatggcatacgctgcatgtataggagcaaatctcgggcactgtgcaccggcgtcctccctcaaagacaaaacacacacttgtccaccttgcccggcacctgaacttctgggcggcccgagcgtttttttgttccctcctaaacctaaggacacgctcatgatcagccgcacgccagaggttacctgtgtagtggtggatgtcagccacgaggatccggaagtaaaattcaactggtatgtagatggggtggaggttcacaatgccaaaaccaagccacgagaggaacagtacaatagtacttaccgggtcgtgtctgtattgaccgtcctgcatcaggattggttgaacgggaaagaatataagtgcaaggtgagcaacaaagcacttccggccccaatagagaaaacaattagtaaagcaaaaggacaaccacgggaaccgcaagtttatacactgccgccctctcgagacgagctgaccaaaaatcaggttagccttacatgtttggtcaaggggttctacccgagtgatattgcagtggaatgggaatccaacggtcaaccagaaaataactacaaaactactccgccggtgttggattcagacggctctttctttctgtatagcaaactcactgttgacaagtcaagatggcagcagggcaatgtatttagctgtagtgttatgcacgaagctcttcataaccactacacacaaaagtcactttctctttccccaggaaaagacatcgattccagcgacagttcagacagctctgacagctccgattcctccgactcaagt

SEQ ID NO: 116 - protein, 752 aa, synthetic construct
  REGION 1..752: note = Synthetic: RMP-005Fc with Secretion Signal peptide 1 IgG2H
MGWSCIILFLVATATGVHSVPEKEKDPKYWRDQAQETLKYALELQKLNTNVAKNVIMFLGDGMGVSTVTAARILKGQLHHNPGEETRLEMDKFPFVALSKTYNTNAQVPDSAGTATAYLCGVKANEGTVGVSAATERSRCNTTQGNEVTSILRWAKDAGKSVGIVTTTRVNHATPSAAYAHSADRDWYSDNEMPPEALSQGCKDIAYQLMHNIRDIDVIMGGGRKYMYPKNKTDVEYESDEKARGTRLDGLDLVDTWKSFKPRYKHSHFIWNRTELLTLDPHNVDYLLGLFEPGDMQYELNRNNVTDPSLSEMVVVAIQILRKNPKGFFLLVEGGRIDHGHHEGKAKQALHEAVEMDRAIGQAGSLTSSEDTLTVVTADHSHVFTFGGYTPRGNSIFGLAPMLSDTDKKPFTAILYGNGPGYKVVGGERENVSMVDYAHNNYQAQSAVPLRHETHGGEDVAVFSKGPMAHLLHGVHEQNYVPHVMAYAACIGANLGHCAPASSLKDKTHTCPPCPAPELLGGPSVFLFPPKPKDTLMISRTPEVTCVVVDVSHEDPEVKFNWYVDGVEVHNAKTKPREEQYNSTYRVVSVLTVLHQDWLNGKEYKCKVSNKALPAPIEKTISKAKGQPREPQVYTLPPSRDELTKNQVSLTCLVKGFYPSDIAVEWESNGQPENNYKTTPPVLDSDGSFFLYSKLTVDKSRWQQGNVFSCSVMHEALHNHYTQKSLSLSPGKDIDSSDSSDSSDSSDSSDSS

SEQ ID NO: 117 - protein, 755 aa, synthetic construct
  REGION 1..755: note = Synthetic: RMP-005Fc with Secretion Signal peptide 2 huIgKVIII Ig kappa light chain V-III region
MDMRVPAQLLGLLLLWLRGARCVPEKEKDPKYWRDQAQETLKYALELQKLNTNVAKNVIMFLGDGMGVSTVTAARILKGQLHHNPGEETRLEMDKFPFVALSKTYNTNAQVPDSAGTATAYLCGVKANEGTVGVSAATERSRCNTTQGNEVTSILRWAKDAGKSVGIVTTTRVNHATPSAAYAHSADRDWYSDNEMPPEALSQGCKDIAYQLMHNIRDIDVIMGGGRKYMYPKNKTDVEYESDEKARGTRLDGLDLVDTWKSFKPRYKHSHFIWNRTELLTLDPHNVDYLLGLFEPGDMQYELNRNNVTDPSLSEMVVVAIQILRKNPKGFFLLVEGGRIDHGHHEGKAKQALHEAVEMDRAIGQAGSLTSSEDTLTVVTADHSHVFTFGGYTPRGNSIFGLAPMLSDTDKKPFTAILYGNGPGYKVVGGERENVSMVDYAHNNYQAQSAVPLRHETHGGEDVAVFSKGPMAHLLHGVHEQNYVPHVMAYAACIGANLGHCAPASSLKDKTHTCPPCPAPELLGGPSVFLFPPKPKDTLMISRTPEVTCVVVDVSHEDPEVKFNWYVDGVEVHNAKTKPREEQYNSTYRVVSVLTVLHQDWLNGKEYKCKVSNKALPAPIEKTISKAKGQPREPQVYTLPPSRDELTKNQVSLTCLVKGFYPSDIAVEWESNGQPENNYKTTPPVLDSDGSFFLYSKLTVDKSRWQQGNVFSCSVMHEALHNHYTQKSLSLSPGKDIDSSDSSDSSDSSDSSDSS

SEQ ID NO: 118 - protein, 756 aa, synthetic construct
  REGION 1..756: note = Synthetic: RMP-005Fc with Secretion Signal peptide 4 huCD33tPA
MDAMKRGLCCVLLLCGAVFVSPSVPEKEKDPKYWRDQAQETLKYALELQKLNTNVAKNVIMFLGDGMGVSTVTAARILKGQLHHNPGEETRLEMDKFPFVALSKTYNTNAQVPDSAGTATAYLCGVKANEGTVGVSAATERSRCNTTQGNEVTSILRWAKDAGKSVGIVTTTRVNHATPSAAYAHSADRDWYSDNEMPPEALSQGCKDIAYQLMHNIRDIDVIMGGGRKYMYPKNKTDVEYESDEKARGTRLDGLDLVDTWKSFKPRYKHSHFIWNRTELLTLDPHNVDYLLGLFEPGDMQYELNRNNVTDPSLSEMVVVAIQILRKNPKGFFLLVEGGRIDHGHHEGKAKQALHEAVEMDRAIGQAGSLTSSEDTLTVVTADHSHVFTFGGYTPRGNSIFGLAPMLSDTDKKPFTAILYGNGPGYKVVGGERENVSMVDYAHNNYQAQSAVPLRHETHGGEDVAVFSKGPMAHLLHGVHEQNYVPHVMAYAACIGANLGHCAPASSLKDKTHTCPPCPAPELLGGPSVFLFPPKPKDTLMISRTPEVTCVVVDVSHEDPEVKFNWYVDGVEVHNAKTKPREEQYNSTYRVVSVLTVLHQDWLNGKEYKCKVSNKALPAPIEKTISKAKGQPREPQVYTLPPSRDELTKNQVSLTCLVKGFYPSDIAVEWESNGQPENNYKTTPPVLDSDGSFFLYSKLTVDKSRWQQGNVFSCSVMHEALHNHYTQKSLSLSPGKDIDSSDSSDSSDSSDSSDSS

SEQ ID NO: 119 - protein, 758 aa, synthetic construct
  REGION 1..758: note = Synthetic: RMP-005Fc with Secretion Signal peptide 5 huCD33tPA-AA
MDAMKRGLCCVLLLCGAVFVSPSAAVPEKEKDPKYWRDQAQETLKYALELQKLNTNVAKNVIMFLGDGMGVSTVTAARILKGQLHHNPGEETRLEMDKFPFVALSKTYNTNAQVPDSAGTATAYLCGVKANEGTVGVSAATERSRCNTTQGNEVTSILRWAKDAGKSVGIVTTTRVNHATPSAAYAHSADRDWYSDNEMPPEALSQGCKDIAYQLMHNIRDIDVIMGGGRKYMYPKNKTDVEYESDEKARGTRLDGLDLVDTWKSFKPRYKHSHFIWNRTELLTLDPHNVDYLLGLFEPGDMQYELNRNNVTDPSLSEMVVVAIQILRKNPKGFFLLVEGGRIDHGHHEGKAKQALHEAVEMDRAIGQAGSLTSSEDTLTVVTADHSHVFTFGGYTPRGNSIFGLAPMLSDTDKKPFTAILYGNGPGYKVVGGERENVSMVDYAHNNYQAQSAVPLRHETHGGEDVAVFSKGPMAHLLHGVHEQNYVPHVMAYAACIGANLGHCAPASSLKDKTHTCPPCPAPELLGGPSVFLFPPKPKDTLMISRTPEVTCVVVDVSHEDPEVKFNWYVDGVEVHNAKTKPREEQYNSTYRVVSVLTVLHQDWLNGKEYKCKVSNKALPAPIEKTISKAKGQPREPQVYTLPPSRDELTKNQVSLTCLVKGFYPSDIAVEWESNGQPENNYKTTPPVLDSDGSFFLYSKLTVDKSRWQQGNVFSCSVMHEALHNHYTQKSLSLSPGKDIDSSDSSDSSDSSDSSDSS

SEQ ID NO: 120 - protein, 754 aa, synthetic construct
  REGION 1..754: note = Synthetic: RMP-005Fc with Secretion Signal peptide 6 Secrecon
MWWRLWWLLLLLLLLWPMVWAVPEKEKDPKYWRDQAQETLKYALELQKLNTNVAKNVIMFLGDGMGVSTVTAARILKGQLHHNPGEETRLEMDKFPFVALSKTYNTNAQVPDSAGTATAYLCGVKANEGTVGVSAATERSRCNTTQGNEVTSILRWAKDAGKSVGIVTTTRVNHATPSAAYAHSADRDWYSDNEMPPEALSQGCKDIAYQLMHNIRDIDVIMGGGRKYMYPKNKTDVEYESDEKARGTRLDGLDLVDTWKSFKPRYKHSHFIWNRTELLTLDPHNVDYLLGLFEPGDMQYELNRNNVTDPSLSEMVVVAIQILRKNPKGFFLLVEGGRIDHGHHEGKAKQALHEAVEMDRAIGQAGSLTSSEDTLTVVTADHSHVFTFGGYTPRGNSIFGLAPMLSDTDKKPFTAILYGNGPGYKVVGGERENVSMVDYAHNNYQAQSAVPLRHETHGGEDVAVFSKGPMAHLLHGVHEQNYVPHVMAYAACIGANLGHCAPASSLKDKTHTCPPCPAPELLGGPSVFLFPPKPKDTLMISRTPEVTCVVVDVSHEDPEVKFNWYVDGVEVHNAKTKPREEQYNSTYRVVSVLTVLHQDWLNGKEYKCKVSNKALPAPIEKTISKAKGQPREPQVYTLPPSRDELTKNQVSLTCLVKGFYPSDIAVEWESNGQPENNYKTTPPVLDSDGSFFLYSKLTVDKSRWQQGNVFSCSVMHEALHNHYTQKSLSLSPGKDIDSSDSSDSSDSSDSSDSS

SEQ ID NO: 121 - protein, 756 aa, synthetic construct
  REGION 1..756: note = Synthetic: RMP-005Fc with Secretion Signal peptide 7 Secrecon-AA
MWWRLWWLLLLLLLLWPMVWAAAVPEKEKDPKYWRDQAQETLKYALELQKLNTNVAKNVIMFLGDGMGVSTVTAARILKGQLHHNPGEETRLEMDKFPFVALSKTYNTNAQVPDSAGTATAYLCGVKANEGTVGVSAATERSRCNTTQGNEVTSILRWAKDAGKSVGIVTTTRVNHATPSAAYAHSADRDWYSDNEMPPEALSQGCKDIAYQLMHNIRDIDVIMGGGRKYMYPKNKTDVEYESDEKARGTRLDGLDLVDTWKSFKPRYKHSHFIWNRTELLTLDPHNVDYLLGLFEPGDMQYELNRNNVTDPSLSEMVVVAIQILRKNPKGFFLLVEGGRIDHGHHEGKAKQALHEAVEMDRAIGQAGSLTSSEDTLTVVTADHSHVFTFGGYTPRGNSIFGLAPMLSDTDKKPFTAILYGNGPGYKVVGGERENVSMVDYAHNNYQAQSAVPLRHETHGGEDVAVFSKGPMAHLLHGVHEQNYVPHVMAYAACIGANLGHCAPASSLKDKTHTCPPCPAPELLGGPSVFLFPPKPKDTLMISRTPEVTCVVVDVSHEDPEVKFNWYVDGVEVHNAKTKPREEQYNSTYRVVSVLTVLHQDWLNGKEYKCKVSNKALPAPIEKTISKAKGQPREPQVYTLPPSRDELTKNQVSLTCLVKGFYPSDIAVEWESNGQPENNYKTTPPVLDSDGSFFLYSKLTVDKSRWQQGNVFSCSVMHEALHNHYTQKSLSLSPGKDIDSSDSSDSSDSSDSSDSS

SEQ ID NO: 122 - protein, 753 aa, synthetic construct
  REGION 1..753: note = Synthetic: RMP-005Fc with Secretion Signal peptide 8 mIgKVIII - Mouse Ig kappa light chain V-III region
METDTLLLWVLLLWVPGSTGVPEKEKDPKYWRDQAQETLKYALELQKLNTNVAKNVIMFLGDGMGVSTVTAARILKGQLHHNPGEETRLEMDKFPFVALSKTYNTNAQVPDSAGTATAYLCGVKANEGTVGVSAATERSRCNTTQGNEVTSILRWAKDAGKSVGIVTTTRVNHATPSAAYAHSADRDWYSDNEMPPEALSQGCKDIAYQLMHNIRDIDVIMGGGRKYMYPKNKTDVEYESDEKARGTRLDGLDLVDTWKSFKPRYKHSHFIWNRTELLTLDPHNVDYLLGLFEPGDMQYELNRNNVTDPSLSEMVVVAIQILRKNPKGFFLLVEGGRIDHGHHEGKAKQALHEAVEMDRAIGQAGSLTSSEDTLTVVTADHSHVFTFGGYTPRGNSIFGLAPMLSDTDKKPFTAILYGNGPGYKVVGGERENVSMVDYAHNNYQAQSAVPLRHETHGGEDVAVFSKGPMAHLLHGVHEQNYVPHVMAYAACIGANLGHCAPASSLKDKTHTCPPCPAPELLGGPSVFLFPPKPKDTLMISRTPEVTCVVVDVSHEDPEVKFNWYVDGVEVHNAKTKPREEQYNSTYRVVSVLTVLHQDWLNGKEYKCKVSNKALPAPIEKTISKAKGQPREPQVYTLPPSRDELTKNQVSLTCLVKGFYPSDIAVEWESNGQPENNYKTTPPVLDSDGSFFLYSKLTVDKSRWQQGNVFSCSVMHEALHNHYTQKSLSLSPGKDIDSSDSSDSSDSSDSSDSS

SEQ ID NO: 123 - protein, 755 aa, synthetic construct
  REGION 1..755: note = Synthetic: RMP-005Fc with Secretion Signal peptide 9 mIgKVIII-AA
METDTLLLWVLLLWVPGSTGAAVPEKEKDPKYWRDQAQETLKYALELQKLNTNVAKNVIMFLGDGMGVSTVTAARILKGQLHHNPGEETRLEMDKFPFVALSKTYNTNAQVPDSAGTATAYLCGVKANEGTVGVSAATERSRCNTTQGNEVTSILRWAKDAGKSVGIVTTTRVNHATPSAAYAHSADRDWYSDNEMPPEALSQGCKDIAYQLMHNIRDIDVIMGGGRKYMYPKNKTDVEYESDEKARGTRLDGLDLVDTWKSFKPRYKHSHFIWNRTELLTLDPHNVDYLLGLFEPGDMQYELNRNNVTDPSLSEMVVVAIQILRKNPKGFFLLVEGGRIDHGHHEGKAKQALHEAVEMDRAIGQAGSLTSSEDTLTVVTADHSHVFTFGGYTPRGNSIFGLAPMLSDTDKKPFTAILYGNGPGYKVVGGERENVSMVDYAHNNYQAQSAVPLRHETHGGEDVAVFSKGPMAHLLHGVHEQNYVPHVMAYAACIGANLGHCAPASSLKDKTHTCPPCPAPELLGGPSVFLFPPKPKDTLMISRTPEVTCVVVDVSHEDPEVKFNWYVDGVEVHNAKTKPREEQYNSTYRVVSVLTVLHQDWLNGKEYKCKVSNKALPAPIEKTISKAKGQPREPQVYTLPPSRDELTKNQVSLTCLVKGFYPSDIAVEWESNGQPENNYKTTPPVLDSDGSFFLYSKLTVDKSRWQQGNVFSCSVMHEALHNHYTQKSLSLSPGKDIDSSDSSDSSDSSDSSDSS

SEQ ID NO: 124 - protein, 752 aa, synthetic construct
  REGION 1..752: note = Synthetic: RMP-005Fc with Secretion Signal peptide 10 Alpha-lactalbumin
MMSFVSLLLVGILFHATQAVPEKEKDPKYWRDQAQETLKYALELQKLNTNVAKNVIMFLGDGMGVSTVTAARILKGQLHHNPGEETRLEMDKFPFVALSKTYNTNAQVPDSAGTATAYLCGVKANEGTVGVSAATERSRCNTTQGNEVTSILRWAKDAGKSVGIVTTTRVNHATPSAAYAHSADRDWYSDNEMPPEALSQGCKDIAYQLMHNIRDIDVIMGGGRKYMYPKNKTDVEYESDEKARGTRLDGLDLVDTWKSFKPRYKHSHFIWNRTELLTLDPHNVDYLLGLFEPGDMQYELNRNNVTDPSLSEMVVVAIQILRKNPKGFFLLVEGGRIDHGHHEGKAKQALHEAVEMDRAIGQAGSLTSSEDTLTVVTADHSHVFTFGGYTPRGNSIFGLAPMLSDTDKKPFTAILYGNGPGYKVVGGERENVSMVDYAHNNYQAQSAVPLRHETHGGEDVAVFSKGPMAHLLHGVHEQNYVPHVMAYAACIGANLGHCAPASSLKDKTHTCPPCPAPELLGGPSVFLFPPKPKDTLMISRTPEVTCVVVDVSHEDPEVKFNWYVDGVEVHNAKTKPREEQYNSTYRVVSVLTVLHQDWLNGKEYKCKVSNKALPAPIEKTISKAKGQPREPQVYTLPPSRDELTKNQVSLTCLVKGFYPSDIAVEWESNGQPENNYKTTPPVLDSDGSFFLYSKLTVDKSRWQQGNVFSCSVMHEALHNHYTQKSLSLSPGKDIDSSDSSDSSDSSDSSDSS

SEQ ID NO: 125 - protein, 750 aa, synthetic construct
  REGION 1..750: note = Synthetic: RMP-005Fc with Secretion Signal peptide 11 - SEAP - Native secreted alkaline phosphatase
MLLLLLLLGLRLQLSLGVPEKEKDPKYWRDQAQETLKYALELQKLNTNVAKNVIMFLGDGMGVSTVTAARILKGQLHHNPGEETRLEMDKFPFVALSKTYNTNAQVPDSAGTATAYLCGVKANEGTVGVSAATERSRCNTTQGNEVTSILRWAKDAGKSVGIVTTTRVNHATPSAAYAHSADRDWYSDNEMPPEALSQGCKDIAYQLMHNIRDIDVIMGGGRKYMYPKNKTDVEYESDEKARGTRLDGLDLVDTWKSFKPRYKHSHFIWNRTELLTLDPHNVDYLLGLFEPGDMQYELNRNNVTDPSLSEMVVVAIQILRKNPKGFFLLVEGGRIDHGHHEGKAKQALHEAVEMDRAIGQAGSLTSSEDTLTVVTADHSHVFTFGGYTPRGNSIFGLAPMLSDTDKKPFTAILYGNGPGYKVVGGERENVSMVDYAHNNYQAQSAVPLRHETHGGEDVAVFSKGPMAHLLHGVHEQNYVPHVMAYAACIGANLGHCAPASSLKDKTHTCPPCPAPELLGGPSVFLFPPKPKDTLMISRTPEVTCVVVDVSHEDPEVKFNWYVDGVEVHNAKTKPREEQYNSTYRVVSVLTVLHQDWLNGKEYKCKVSNKALPAPIEKTISKAKGQPREPQVYTLPPSRDELTKNQVSLTCLVKGFYPSDIAVEWESNGQPENNYKTTPPVLDSDGSFFLYSKLTVDKSRWQQGNVFSCSVMHEALHNHYTQKSLSLSPGKDIDSSDSSDSSDSSDSSDSS

SEQ ID NO: 126 - DNA, 3079 bp, Homo sapiens
  misc_feature 1..3079: note = CD68Lp promoter sequence
  source 1..3079: mol_type = genomic DNA
ccaatcccctgggtcactttgctcttgtgcacgctttccagtctttcagcgtaagccagagtcattcccaaggatgctggtttctctctgggggaagagctgctctgtgatggagcccatgcgtgtcatctgagcctctggcttccctgccagtgcagccctggcagtgtcctacttcccagggctgttgtctgcctggcgggaaggtcctgggcaaaggatcagtctttgtactctgagagcagactacttggctcctctctgttttttatcagcgaagttggatatatctctcccacatttccctaatcatatgctatatattggctttttttttcttctctagcccccaaatacatcaagatgtttgtactggatgaagctgacgaaatgttaagccgtggattcaaggaccagatctatgacatattccaaaagctcaacagcaacacccaggtgagggcagtcttgcttgaatagctaatgattcttgaaaaatagtaagtgccaggggaaccatatactggattcttgagcctttttatgcatctgcttcagttttaggtgtggctagggaagggagcaggcctcaggaaggaaccagcactctaagactggcctttttttccactaggtagttttgctgtcagccacaatgccttctgatgtgcttgaggtgaccaagaagttcatgagggaccccattcggattcttgtcaagaaggaagagttgaccctggagggtatccgccagttctacatcaacgtggaacgagaggtggggcccagtgcaggaggcgggcctggtagtgagttgttgggtatagcccctgactgatttttgtcccccaacctccaggagtggaagctggacacactatgtgacttgtatgaaaccctgaccatcacccaggcagtcatcttcatcaacacccggaggaaggtggactggctcaccgagaagatgcatgctcgagatttcactgtatccgccatggtgtgtttgcccgctgccagcctgttgtgggtctgcccgtcagaagtgtcctacttgaagccagggttcctggaacccaggtgcctacctggtctgctgcatatttgttttctcttccagcatggagatatggaccaaaaggaacgagacgtgattatgagggagtttcgttctggctctagcagagttttgattaccactgacctgctggtgagtagagggaactgatagcaaaggcagaagggaggatccaaggtgattccctctccaaggggacatcagtgcctctcaggaaagtagcagcttggaatagaatctggcatgcctaaggcctttggggaactgggatgcttatttcctctgccttccttggctgcccacatggatgcctaagtgtcttccctccgggatagagtgtcctccgtgcacatgctgaagagttgtctttcttgacgtaggccagaggcattgatgtgcagcaggtttctttagtcatcaactatgaccttcccaccaacagggaaaactatatccacaggtaagcgtagatctggaacactcccctaccccttcacacctggccctccctgggcttaaagctcctgatattcctcatccccttccttgttttccagaatcggtcgaggtggacggtttggccgtaaaggtgtggctattaacatggtgacagaagaagacaagaggactcttcgagacattgagaccttctacaacacctccattgaggaaatgcccctcaatgttgctgacctcatctgaggggctgtcctgccacccagccccagccagggctcaatctctgggggctgaggagcagcaggaggggggagggaagggagccaagggatggacatcttgtcattttttttctttgaataaatgtcactttttgaggcaaaagaaggaaccgtgaacattttagacacccttttctttggggtaggctcttgccccaggcgccggctcttctcccaaaaaaaaaaaaaaaacactaatccatttccctaacctagtaacctccagatcccagaggctctcctcacctcagctgagctcctttgaaagtgattcaagggactatgtcactcagcctcatttgctggaccaaatctggagggagaacccctaaaacccctaagtgaggttgcccagggggttgtccccaggtggggggaagcaggggagagaaaatggtagccatttttacattgttttgtatagtatttattgattcaggaaacaaacacaaaattctgaataaaatgacttggaaactgcctgtttgggcttctcatttcttacctccccttccctctcccacctgctactgggtgcatctctgctccccccttccccagcagatggttacctttgggctgttgctttcttgtcaccatctgagttctcagacgctggaaagccatgttctcggctctgtgaatgacaatgctgactggagtgctgcccctctgtaaagggctgggtgtggatggtcacaagcccctcacatgcctcagccaagaggaagtagtacaggggtcagcccagaggtccaggggaaaggagtggaaaccgatttccccaccaagggaggggcctgtacctcagctgttcccatagctacttgccacaactgccaagcaagtttcgctgagtttgacacatggatccctgtggatcaactgccctaggactccgtttgcacccatgtgacactgttgactttgccctgatgaagcagggccaacagtcccctaacttaattacaaaaactaatgactaagagagaggtggctagagctgaggcccctgagtcaggctgtgggtgggatcatctccagtacaggaagtgagactttcatttcctcctttccaagagagggctgagggagcagggttgagcaactggtgcagacagcctagctggactttgggtgaggcggttcagcctgctggggctactggcaggtaaggaggaaggaggctgaggggagggggcccctgggagggagcctgccctgggttgctaaccatctcctctctgccaaaagcccaggggac

SEQ ID NO: 127 - DNA, 412 bp, synthetic construct
  misc_feature 1..412: note = Synthetic: 400bp cHS insulator
  source 1..412: mol_type = other DNA
atccctgcaggcattcaaggccaggctggatgtggctctgggcagcctgggctgctggttgatgaccctgcacatagcagggggttggatctggatgagcactgtgctcctttgcaacccaggccgttctatgattctgtcattctaaatctctctttcagcctaaagctttttccccgtatccccccaggtgtctgcaggctcaaagagcagcgagaagcgttcagaggaaagcgatcccgtgccaccttccccgtgcccgggctgtccccgcacgctgccggctcggggatgcggggggagcgccggaccggagcggagccccgggcggctcgctgctgccccctagcgggggagggacgtaattacatccctgggggctttgggggggggctgtccccgtgagctcccc

SEQ ID NO: 128 - DNA, 412 bp, synthetic construct
  misc_feature 1..412: note = Synthetic: engineered 400bp cHS insulator m3SD400in
  source 1..412: mol_type = other DNA
atccctgcaggcattcaaggccaggctggatgtggctctgggcagcctgggctgctggttgatgaccctgcacatagcagggggttggatctggatgagcactgtgctcctttgcaacccaggccgttctatgattctgtcattctaaatctctctttcagcctaaagctttttccccgtatccccccaagtgtctgcaggctcaaagagcagcgagaagcgttcagaggaaagcgatcccgtgccaccttccccgtgcccgggctgtccccgcacgctgccggctcggggatgcggggggagcgccggaccggagcggagccccgggcggctcgctgctgccccctagcgggggagggacgtaattacatccctgggggctttgggggggggctgtccccgtgagctcccc

SEQ ID NO: 129 - DNA, 400 bp, synthetic construct
  misc_feature 1..400: note = Synthetic: engineered 400bp cHS insulator m6SD400in
  source 1..400: mol_type = other DNA
attcaaggccaggctggatgtggctctgggcagcctgggctgctggttgatgaccctgcacatagcagggggttggatctggatgagcactgtgctcctttgcaacccaggccgttctatgattctgtcattctaaatctctctttcagcctaaagctttttccccgtatccccccgggtgtctgcaggctcaaagagcagcgagaagcgttcagaggaaagcgatcccgtgccaccttccccgtgcccgggctgtccccgcacgctgccggctcggggatgcggggggagcgccggaccggagcggagccccgggcggctcgctgctgccccctagcgggggagggacgtaattacatccctgggggctttgggggggggctgtccccgtgagctcccc

SEQ ID NO: 130 - protein, 227 aa, synthetic construct
  REGION 1..227: note = Synthetic
DKTHTCPPCPAPELLGGPSVFLFPPKPKDTLMISRTPEVTCVVVDVSHEDPEVKFNWYVDGVEVHNAKTKPREEQYNSTYRVVSVLTVLHQDWLNGKEYKCKVSNKALPAPIEKTISKAKGQPREPQVYTLPPSREEMTKNQVSLTCLVKGFYPSDIAVEWESNGQPENNYKTTPPVLDSDGSFFLYSKLTVDKSRWQQGNVFSCSVMHEALHNHYTQKSLSLSPGK

SEQ ID NO: 131 - DNA, 2277 bp, synthetic construct
  misc_feature 1..2277: note = Synthetic: RMP-005Fc with IgKVIII signal peptide
  source 1..2277: mol_type = other DNA
atggatatgcgcgtacccgctcaacttctgggtttgttgctgctttggctcaggggagcccgctgtgccgcgcttgtccctgaaaaggagaaggaccccaaatattggagagaccaggctcaggaaaccctcaagtacgctcttgaactgcaaaagcttaatactaacgtggctaaaaacgtgataatgttcttgggggacggaatgggggtttcaaccgttaccgcggccagaatcttgaaagggcagctgcaccataacccaggcgaagaaacgaggctggagatggacaaatttccattcgtggcgctttctaagacctacaacactaacgcccaggtccctgactcagctggtacggccactgcctacctttgtggagtgaaggcaaatgaggggactgttggtgtttccgcagctactgagagatctcggtgtaatacgactcaaggtaatgaagttacatccatactccgatgggcaaaagacgcgggcaaatctgttgggattgttacaactactagggtgaaccatgcgacaccctctgcagcttatgcgcacagtgccgaccgagactggtattcagataatgagatgccacccgaggcccttagccagggctgcaaggacatagcctatcaattgatgcacaatatcagagacatagacgttataatgggtggtggtcgcaagtacatgtaccccaaaaacaaaaccgacgtagagtatgaatccgatgaaaaagctaggggcaccagactcgacggacttgatctggttgatacatggaagagcttcaagcccagatacaagcattcacatttcatctggaacaggaccgaacttctcacattggacccccacaatgttgactatctcctcggtttgtttgaaccaggggatatgcagtatgagctcaatcggaacaacgtcactgaccccagtttgagtgaaatggtcgttgttgcaatacaaattttgaggaaaaatccaaaggggtttttcttgttggtagagggcggacggatagatcacgggcaccacgaaggcaaagcaaaacaggccctgcacgaagccgttgaaatggatcgcgctatcggtcaagccggctccctgacgagtagtgaagataccttgaccgtcgtcactgcggatcatagccacgtttttacctttgggggatacacccccaggggcaactcaatttttggacttgcaccgatgctcagcgacacagataaaaagccttttactgcgattctgtatggcaacggccctggatacaaagtagtagggggtgaaagggaaaacgtcagcatggtggactatgcacacaataattatcaggcgcagtccgctgttccgctgcggcatgagactcacgggggagaggacgttgctgtcttttccaagggaccaatggctcatcttctccatggagtccatgagcaaaattatgtccctcatgtcatggcatacgctgcatgtataggagcaaatctcgggcactgtgcaccggcgtcctccctcaaagacaaaacacacacttgtccaccttgcccggcacctgaacttctgggcggcccgagcgtttttttgttccctcctaaacctaaggacacgctcatgatcagccgcacgccagaggttacctgtgtagtggtggatgtcagccacgaggatccggaagtaaaattcaactggtatgtagatggggtggaggttcacaatgccaaaaccaagccacgagaggaacagtacaatagtacttaccgggtcgtgtctgtattgaccgtcctgcatcaggattggttgaacgggaaagaatataagtgcaaggtgagcaacaaagcacttccggccccaatagagaaaacaattagtaaagcaaaaggacaaccacgggaaccgcaagtttatacactgccgccctctcgagacgagctgaccaaaaatcaggttagccttacatgtttggtcaaggggttctacccgagtgatattgcagtggaatgggaatccaacggtcaaccagaaaataactacaaaactactccgccggtgttggattcagacggctctttctttctgtatagcaaactcactgttgacaagtcaagatggcagcagggcaatgtatttagctgtagtgttatgcacgaagctcttcataaccactacacacaaaagtcactttctctttccccaggaaaagacatcgattccagcgacagttcagacagctctgacagctccgattcctccgactcaagttga

1. A polypeptide comprising Formula (IB):
[A]ᵥ-[B]-[C]_{w}-[R]_{q}-([D]ₓ-[E]_{y})_{z}, (IB)
wherein
A comprises an amino acid sequence encoding a secretion signal peptide;
B comprises an amino acid sequence having at least 90% sequence identity to a SEQ ID NO: 11;
C comprises an amino acid sequence encoding a GPI anchor;
R is -(Mₒ(Fc)Nₚ)-, where M and N each independently include between 1 and 6 amino acids, where Fc is a Fc domain, and o and p are each independently 0, 1, or 2;
D comprises an amino acid sequence having between 4 and 6 amino acids, or is F(G) t F, where each F is the same amino acid, G is an amino acid sequence having 3, 4, or 5 amino acids, and t is an integer ranging from 2-5;
E comprises an amino acid sequence having between 1 and 8 amino acids;
q is 0 or 1;
v is 0 or 1;
w is 0 or 1;
x is 0 or an integer ranging from 1 to 6;
y is 0 or an integer ranging from 1 to 16; and
z is 0 or an integer ranging from 1 to 6;
wherein E comprises -D-S-S-.

2. The polypeptide of claim 1, wherein q is 1.

3. The polypeptide of claim 2, wherein v is 1, w is 1, x is 0, and z is 1.

4. The polypeptide of claim 3, wherein y is an integer ranging from 4-8.

5. The polypeptide of claim 4, wherein y is 6.

6. The polypeptide of claim 3, wherein R comprises SEQ ID NO: 9.

7. The polypeptide of claim 3, wherein [R] is -[L-K]-Fc-[D-I]-, and wherein Fc comprises at least 97% identity to SEQ ID NO: 130.

8. The polypeptide of claim 1, wherein x is 0 and [E]_{y} is [-D-S-S-]₆.

9. The polypeptide of claim 1, wherein [D]ₓ is [-G-G-G-G-S-]₁ or [-G-G-G-G-S-]₂.

10. The polypeptide of claim 1, wherein q is 0 and [E]_{y} is [-D-S-S-]₆.

11. The polypeptide of claim 1, wherein the polypeptide has an amino acid sequence having at least 97% identity to any one of SEQ ID NOS: 5, 44-54, 105, and 116-125.

12. The polypeptide of claim 1, wherein the polypeptide has an amino acid sequence having at least 98% identity to any one of SEQ ID NOS: 5, 44-54, 105, and 116-125.

13. The polypeptide of claim 1, wherein the polypeptide has an amino acid sequence having at least 99% identity to any one of SEQ ID NOS: 5, 44-54, 105, and 116-125.

14. The polypeptide of claim 1, wherein the polypeptide has any one of SEQ ID NOS: 5, 44-54, 105, and 116-125.

15. The polypeptide of claim 1, wherein the polypeptide is encoded by a nucleotide sequence having at least 95% identity to any one of SEQ ID NOS: 111, 115, and 131.

16. The polypeptide of claim 1, wherein the polypeptide is encoded by a nucleotide sequence having at least 98% identity to any one of SEQ ID NOS: 111, 115, and 131.

17. The polypeptide of claim 1, wherein the signal secretion peptide has at least 95% identity to any one of SEQ ID NOS: 33-43.

18. The polypeptide of claim 1, wherein the GPI anchor has at least 95% identity to any one of SEQ ID NOS: 13 and 14.

19. The polypeptide of claim 1, wherein o is 0 or 1; p is 0 or 1; x is 0 or 1; and z is 0 or 1.

20. A lentiviral vector which expresses the polypeptide of claim 1.
